United States Patent Application Publication US 2024/0342206 A1 - sequence listing, part 4

SEQ ID NO: 5430 - RNA, 1562 nt, synthetic construct
  misc_feature 1..1562: note = mRNA a-1 (A100) (opt11) from Homo sapiens__NP_000448.3__HNF4A(39-474)(R2V_K5V)
  source 1..1562: mol_type = other RNA
aggagagtcccgcagtcggcgtccagcggctctgcttgttcgtgtgtgtgtcgttgcaggccttattcaagcttaccatggacacctccccctcagaaggtaccaacctcaacgcacccaactcgctcggcgtatcagccctttgtgccatctgcggtgatcgcgcaaccggaaaacactacggcgcatcctcatgcgacggctgcaaaggcttcttccgccgatccgtccgtaaaaaccatatgtactcctgtcgattctcccgccaatgtgtcgtagataaagacaaacgcaaccaatgcagatactgccgcctaaaaaaatgcttccgggcaggtatgaagaaagaagcagtccaaaacgaacgcgaccgcatcagcacccgccgctcctcctacgaagactcgtccctcccatccatcaacgccctactccaagccgaagtcttatcccgacaaatcacttcccccgtctccggcataaacggcgacatccgcgcaaaaaaaatcgcctccatagccgacgtctgcgaatcaatgaaagaacaactcctagtccttgtcgaatgggccaaatacatccccgcattctgcgaactcccactcgatgaccaggtagccctcctccgcgcccacgcgggtgaacacctcctcctcggggccaccaaacgctccatggtattcaaagacgtcctcctcctcggaaacgactacatcgtcccacgccattgccccgagctagccgaaatgtctagagtctccatacgcatcctcgacgaactcgtactccccttccaagaactccaaattgatgacaacgaatacgcctacctcaaagcaatcatcttcttcgaccccgacgccaaagggctctccgacccaggaaaaatcaaacgcctcagatcccaagtccaggtatcactcgaagactacatcaacgaccgacaatacgactcccgaggccgtttcggcgaactcctactcctcttaccaaccctacaatccatcacatggcaaatgatcgaacaaattcaattcatcaaactcttcggaatggccaaaatcgacaatctcctacaagaaatgctcctcggaggatcaccctcagacgccccacacgcccaccaccctttacatccccacctaatgcaagaacacatgggaaccaacgtcatcgtagccaacaccatgccaacacacctctcaaacggacaaatgtgcgagtggcccagaccccgaggccaagccgccacaccagaaacaccccagccctcaccacccggcggctcaggctccgaaccctacaaactactccccggagccgtcgccaccatcgtcaagccactatcagcaatcccacaacccaccatcaccaaacaagaagtaatctaaggactagtccctgttcccagagcccacttttttttctttttttgaaataaaatagcctgtctttcagatctaaaaaaaaaaaaaaaaaaaaaaaaaaaaaaaaaaaaaaaaaaaaaaaaaaaaaaaaaaaaaaaaaaaaaaaaaaaaaaaaaaaaaaaaaaaaaaaaaaaa

SEQ ID NO: 5431 - RNA, 1562 nt, synthetic construct
  misc_feature 1..1562: note = mRNA a-1 (A100) (opt11) from Homo sapiens__NP_000448.3__HNF4A(39-474)(K179R_K180R)
  source 1..1562: mol_type = other RNA
aggagagtcccgcagtcggcgtccagcggctctgcttgttcgtgtgtgtgtcgttgcaggccttattcaagcttaccatggacacctccccctccgaaggaaccaacctaaacgcccccaactccctaggcgtctccgccctctgcgcaatatgcggagaccgcgcaaccggcaaacattacggcgcttcctcctgtgacggttgcaaaggatttttccgccgatccgtccgtaaaaaccacatgtactcctgccgcttcagccgacaatgcgtggtagataaagacaaacgcaaccaatgccgttactgccgactcaaaaaatgcttccgagccggaatgaaaaaagaagcagtccaaaacgaacgcgaccgcatctctacacgcagatcttcatatgaagatagcagcctccccagcatcaacgccctcctccaagccgaagtcctctcccgacaaatcacctccccagtaagcggcataaatggcgacatccgtgcccggcgcatcgcatcaatcgccgacgtatgcgaatcaatgaaagaacaactactagtcctcgtcgaatgggcaaaatacatacccgcattctgcgaactccccctcgacgaccaagtagccctcctacgcgcccacgccggagaacacctactcctcggggccacgaaacgatccatggtcttcaaagacgtcctactcctcggaaatgactacatagtccccaggcactgccccgaactcgccgaaatgtcccgcgtctcaattcgaatcctagacgaactcgtcctacccttccaagaactccaaatagacgacaacgaatacgcttacctcaaagccattatcttcttcgacccagacgccaaaggactctccgacccgggaaaaataaaacgactacgcagccaagtccaagtctccttagaagactacatcaacgaccgccagtacgactcccgcggccgattcggagagcttctcctactcctccccaccctccaatccatcacatggcaaatgatcgaacaaatccaattcataaaactcttcggcatggccaaaatcgataatctactccaagaaatgctcctcggcgggtccccatcagacgccccccacgcacaccacccgctgcacccacacctaatgcaagaacacatgggaacaaacgtcatcgtcgccaacacaatgcccacccacctctcaaacggacagatgtgcgaatggccccgcccacgcggccaagcggcaacccccgaaacaccacagccctccccccccggcggcagcggctcagaaccctacaaactcctcccaggagcagtcgccaccatagtcaagcccctctcagccatcccacaaccaaccatcaccaaacaagaagtaatatagggactagtccctgttcccagagcccacttttttttctttttttgaaataaaatagcctgtctttcagatctaaaaaaaaaaaaaaaaaaaaaaaaaaaaaaaaaaaaaaaaaaaaaaaaaaaaaaaaaaaaaaaaaaaaaaaaaaaaaaaaaaaaaaaaaaaaaaaaaaaa

SEQ ID NO: 5432 - RNA, 1562 nt, synthetic construct
  misc_feature 1..1562: note = mRNA a-1 (A100) (opt11) from Homo sapiens__NP_000448.3__HNF4A(39-474)(K234R)
  source 1..1562: mol_type = other RNA
aggagagtcccgcagtcggcgtccagcggctctgcttgttcgtgtgtgtgtcgttgcaggccttattcaagcttaccatggacacctccccatccgaaggcaccaaccttaacgcacccaactccctcggagtatccgccctctgcgccatctgcggcgaccgcgccacaggcaaacactacggagcctcatcctgcgacggctgcaaaggcttcttccgacgctccgtcagaaaaaaccacatgtactcctgccgattctcccgtcaatgcgtagtcgacaaagacaaacgcaaccaatgccgatactgccgcctcaaaaagtgcttccgagccggcatgaaaaaagaagccgtccagaacgagcgcgaccgaatctccacaagaagatcatcatacgaagactcctccctcccctccatcaacgccctactccaagccgaagtcctctccagacaaatcacaagccccgtatccggtatcaacggcgacataagagccaaaaaaatcgcctccatagccgacgtctgcgaatccatgaaagaacaactcctcgtgctcgtagaatgggccaaatacattcccgccttctgcgaactccctctcgacgaccaggtcgctctactcagggctcacgccggcgaacacctcctcctcggcgcaacccgccgctccatggtattcaaagacgtcctactactcggaaacgactacatcgttccccgccactgcccagagctcgctgaaatgtctcgcgtctccatccgcatcctcgacgaactcgtcctcccattccaagaactccaaatcgacgacaacgaatacgcctacctaaaagccataatcttcttcgaccccgacgcaaaaggactctccgacccagggaaaattaaacgactccgctcccaagtacaggtaagcctcgaagactacatcaacgaccgccaatacgattcccgaggccgcttcggcgaacttctcctactactacccaccctacagtccatcacctggcaaatgatcgaacaaatccaattcatcaaacttttcggaatggccaaaatcgacaacctcctccaagaaatgctcctcggcggctccccctccgacgccccccacgcacaccaccccctccacccacaccttatgcaagaacatatgggcacaaacgtcatcgtcgccaacaccatgcccacccacctctctaacggccaaatgtgcgaatggccccgcccaagaggccaagccgccaccccagaaaccccgcaacctagcccacccggcggctccggcagcgaaccctacaaactattacccggagcagtggccacgatcgtaaagcccctcagcgcaatcccacaaccaacaatcactaaacaagaagtcatctaaggactagtccctgttcccagagcccacttttttttctttttttgaaataaaatagcctgtctttcagatctaaaaaaaaaaaaaaaaaaaaaaaaaaaaaaaaaaaaaaaaaaaaaaaaaaaaaaaaaaaaaaaaaaaaaaaaaaaaaaaaaaaaaaaaaaaaaaaaaaaa

SEQ ID NO: 5433 - RNA, 1562 nt, synthetic construct
  misc_feature 1..1562: note = mRNA a-1 (A100) (opt11) from Homo sapiens__NP_000448.3__HNF4A(39-474)(K300R)
  source 1..1562: mol_type = other RNA
aggagagtcccgcagtcggcgtccagcggctctgcttgttcgtgtgtgtgtcgttgcaggccttattcaagcttaccatggacacctccccctcggaaggcaccaacctcaacgcccccaactcccttggggtcagtgcactatgcgccatctgcggcgatagagccaccggaaagcactacggcgcctcctcatgcgacggctgcaaaggcttcttccgccgatccgtccgcaaaaaccacatgtactcatgcagattcagcagacaatgcgtcgtcgacaaagacaagagaaaccagtgccgatactgccgcctcaagaaatgtttccgcgccggcatgaagaaagaagcagtccaaaacgaacgcgaccgcatctccacccgccgctcatcctacgaagactccagcctaccctccataaatgccctactccaagcagaagtcctctcccgccaaataacctccccagtatccggaatcaacggcgacatccgcgccaagaaaatcgcctcaatagcagacgtctgcgaatccatgaaagaacaactacttgtcttagtagaatgggccaaatacatccccgccttttgcgaactaccccttgacgaccaagtcgccctcctccgcgcacacgccggcgaacacctattactaggcgccactaaacgctccatggtcttcaaagacgtactcctcctcggcaacgactatatcgtcccccgacactgccccgaactcgccgaaatgtcccgcgtctcaatacgaatcctcgacgaactcgtcctccccttccaagaactacagatcgacgacaacgaatacgcctacctcaaagcaatcatcttcttcgaccccgacgcccgcggcctatccgaccctggcaaaatcaaacgcctgcgctcccaagtacaagtgtccctcgaagactacatcaacgaccgacagtacgattcccgaggccgattcggcgaactcctcctcctactcccaacactccaatccatcacctggcaaatgatcgaacaaatccaattcattaaactcttcggcatggcaaaaatcgacaacctcctacaagaaatgctcctcggtgggtccccctccgatgctccccacgcccaccaccccctccacccccacctcatgcaggaacacatgggcaccaacgtcatcgtcgccaacacaatgccaacccacctctcaaacggacaaatgtgtgaatggccccgaccccgaggccaagcagccacacccgaaacaccccaaccctcacccccaggcggctccggctcagaaccctacaaactactcccaggagccgtcgccaccatcgtaaaaccactaagcgccataccccaaccaactatcacaaaacaggaggtcatctaaggactagtccctgttcccagagcccacttttttttctttttttgaaataaaatagcctgtctttcagatctaaaaaaaaaaaaaaaaaaaaaaaaaaaaaaaaaaaaaaaaaaaaaaaaaaaaaaaaaaaaaaaaaaaaaaaaaaaaaaaaaaaaaaaaaaaaaaaaaaaa

SEQ ID NO: 5434 - RNA, 1562 nt, synthetic construct
  misc_feature 1..1562: note = mRNA a-1 (A100) (opt11) from Homo sapiens__NP_000448.3__HNF4A(39-474)(K300R_K307R_K309R)
  source 1..1562: mol_type = other RNA
aggagagtcccgcagtcggcgtccagcggctctgcttgttcgtgtgtgtgtcgttgcaggccttattcaagcttaccatggacacctccccatccgaaggcaccaacctcaacgccccaaactccctcggtgtatccgcactctgcgcaatctgcggcgaccgcgctacaggcaaacactacggcgcatcctcctgcgacggatgcaagggcttcttccgccgctcagtccggaaaaaccacatgtactcttgccgcttctcacgtcagtgcgtggtcgacaaagacaaacgcaaccaatgccgctactgccgactcaaaaaatgcttccgcgccggaatgaaaaaagaagcagtacaaaacgaacgagaccgcatcagcacccgtcgctccagctacgaagactcttcacttccctccatcaacgccctcctccaagccgaagtcctctcacgccaaatcacgtcccccgtctccggcataaacggcgacatccgagcaaaaaaaatcgcctccatcgcagacgtatgcgaatccatgaaagaacagctcctagtcctcgtcgaatgggccaaatacatcccagcattctgcgaacttcccctagacgaccaagtcgcccttctcagagcacacgctggggaacacctcctactaggcgcaacaaaacgctccatggtcttcaaagacgtactactcctcggcaacgactacatagtccctcgccactgccccgaactcgcagaaatgtcccgagtctcaatacgaatactagacgaactagtcctccctttccaagaactacaaatcgacgacaacgaatacgcttacctaaaagccatcattttcttcgacccagacgcccgcgggctctccgaccccggccgcatacgacgccttcgctcccaagtccaagtatcattagaagactacatcaacgaccgccaatacgactcccgcggccgcttcggagaactcctactcctcctacccacactccagtccatcacctggcaaatgatcgaacaaatccaattcattaaactattcggcatggccaaaatcgacaacctactccaagaaatgctcctcggcggaagcccctctgacgcccctcacgcacaccaccccctacacccacacttgatgcaggaacacatggggaccaacgtcatcgtcgccaacaccatgcccacacatctctcaaatggccaaatgtgcgaatggccacgacctcgcggtcaagctgctaccccagaaaccccccaaccttccccacccggcggttcaggctcggaaccctacaaactccttcccggcgccgtcgccacaatagtcaaaccactatccgcaatcccccaacccacaattaccaaacaagaagtaatctagggactagtccctgttcccagagcccacttttttttctttttttgaaataaaatagcctgtctttcagatctaaaaaaaaaaaaaaaaaaaaaaaaaaaaaaaaaaaaaaaaaaaaaaaaaaaaaaaaaaaaaaaaaaaaaaaaaaaaaaaaaaaaaaaaaaaaaaaaaaaa

SEQ ID NO: 5435 - RNA, 1562 nt, synthetic construct
  misc_feature 1..1562: note = mRNA a-1 (A100) (opt11) from Homo sapiens__NP_000448.3__HNF4A(39-474)(K447R_K470R)
  source 1..1562: mol_type = other RNA
aggagagtcccgcagtcggcgtccagcggctctgcttgttcgtgtgtgtgtcgttgcaggccttattcaagcttaccatggacacctccccatccgaaggaacaaacctcaacgctcccaacagcttaggtgtctccgccctctgcgccatctgcggagatcgcgccaccggcaaacactacggcgcctcatcatgcgacggctgcaaaggcttcttccgacgctcagtccgcaaaaaccacatgtactcctgcagattctcaagacaatgtgtcgttgacaaagacaaacgaaaccaatgccgatactgccgccttaaaaaatgcttccgcgcaggaatgaaaaaagaagcagtccagaacgaacgcgaccgcatatccacccgccgttccagctacgaagacagctcactcccttcaatcaacgccctactacaagccgaagtcctctcccgacaaataacctcacccgtatccggcatcaacggagacatacgcgccaaaaaaatagcctcaatcgccgacgtctgcgaatccatgaaagaacaactcctagtcctagtcgaatgggccaaatacatacccgcattctgcgaactccccctagacgaccaggtagccctcctccgagcccacgccggcgagcacctcttacttggcgcaaccaaacgctccatggtattcaaggacgtcctactcctaggcaatgactacatcgtcccccgccactgccccgaactcgctgaaatgtcccgagtctcaatcagaattctagatgaactagtcctacccttccaagaactccaaatagacgacaacgaatacgcatacctcaaagccatcatattcttcgaccccgatgccaaaggtctaagcgaccccggaaaaataaagcgactacggtcgcaagtacaagtctccctggaagactacataaacgaccgccaatacgacagccgcggacgattcggagaactactcctactcctccccactctccaatccataacatggcaaatgatcgaacaaatccaattcatcaaactattcggcatggccaaaatcgacaatcttttacaggaaatgctacttggaggatccccatccgacgcccctcacgcgcaccacccactccacccacacctcatgcaagaacacatgggcaccaacgtgatagtagcaaacaccatgcccacccacctctccaacggccaaatgtgcgagtggccacgaccacggggccaagccgccaccccagagacaccacaaccctcaccccccggaggctccggctccgaaccctaccgactactgccaggagccgtcgcaaccatcgtaaaaccactcagcgccatcccccaacccaccatcacccggcaagaagtcatctaaggactagtccctgttcccagagcccacttttttttctttttttgaaataaaatagcctgtctttcagatctaaaaaaaaaaaaaaaaaaaaaaaaaaaaaaaaaaaaaaaaaaaaaaaaaaaaaaaaaaaaaaaaaaaaaaaaaaaaaaaaaaaaaaaaaaaaaaaaaaaa

SEQ ID NO: 5436 - RNA, 1562 nt, synthetic construct
  misc_feature 1..1562: note = mRNA a-1 (A100) (opt11) from Homo sapiens__NP_000448.3__HNF4A(39-474)(K458R)
  source 1..1562: mol_type = other RNA
aggagagtcccgcagtcggcgtccagcggctctgcttgttcgtgtgtgtgtcgttgcaggccttattcaagcttaccatggacacaagcccatctgaaggaactaacctcaacgcccccaactccctaggagtatccgctctctgcgccatctgcggagaccgcgccaccgggaaacactacggcgcctcctcatgcgacggatgcaaaggcttcttccgccgctcagtccgcaaaaaccacatgtactcctgtcgattctcccgacaatgcgtcgtcgacaaagacaaacgcaaccaatgccgatactgccgcctcaagaaatgcttcagagccggcatgaagaaagaagccgtacaaaacgaacgagaccgcatctccacacgccgtagctcctacgaagactcaagcctcccctcaatcaacgccctacttcaggccgaagtcctctcccgacaaattaccagcccagtctccggcatcaacggcgacatccgagccaagaaaatcgcatcaatagccgatgtctgcgaaagcatgaaagaacaactccttgtcctcgtagaatgggccaaatacatccccgccttctgcgaactacccctcgatgaccaagtagccctactcagagcccacgccggcgaacacctcctcctcggcgccaccaaacgcagcatggtcttcaaagatgtactcctcctcggcaacgactacatcgtcccccgacactgccccgaacttgcagaaatgagcagagtctcaatccgcatcctcgacgaactcgtactaccattccaagaactccagatcgacgacaacgaatacgcctacctgaaagcaattatcttcttcgaccccgacgccaaaggcctctcagaccccggcaaaattaaacgcctcagaagtcaagtccaagtatccctcgaagactatatcaatgaccgccaatacgactcccgcgggcgcttcggcgaactcctcctccttctcccaaccctccaatcaatcacctggcaaatgatcgaacaaatccaattcataaaattattcggaatggccaaaatcgacaacctactccaggaaatgctcctcggcgggtccccctccgacgccccacacgcccaccaccccctccacccccacctaatgcaagaacatatgggcaccaacgtcatcgtcgcaaacaccatgccaacccacctctcaaacggacaaatgtgcgaatggccccgtccccgaggccaggccgccacccccgaaacccctcaaccctcgcctcccggaggctccggctcagaaccctacaaactcctcccaggtgcagttgcaacaatagtcagacccctctccgccatcccccagcccacaataacaaaacaagaagtcatctaaggactagtccctgttcccagagcccacttttttttctttttttgaaataaaatagcctgtctttcagatctaaaaaaaaaaaaaaaaaaaaaaaaaaaaaaaaaaaaaaaaaaaaaaaaaaaaaaaaaaaaaaaaaaaaaaaaaaaaaaaaaaaaaaaaaaaaaaaaaaaa

SEQ ID NO: 5437 - RNA, 1562 nt, synthetic construct
  misc_feature 1..1562: note = mRNA a-1 (A100) (opt11) from Homo sapiens__NP_000448.3__HNF4A(39-474)(K106R_K108R_K126R_K127R )
  source 1..1562: mol_type = other RNA
aggagagtcccgcagtcggcgtccagcggctctgcttgttcgtgtgtgtgtcgttgcaggccttattcaagcttaccatggacacctcaccctccgaaggcaccaacctcaacgctcccaactccctaggcgtctcagccctctgcgcgatatgcggagaccgagccaccggtaaacactacggcgcttcgagctgcgacggctgcaaaggcttcttccgtcgctcagtccgcaaaaaccacatgtactcatgccgattctcacgccaatgcgtagtagaccgcgaccgccgcaaccagtgccgatactgccgtcttaagaaatgcttccgcgccggcatgcgcagagaagcagtccaaaacgaacgcgaccgcatctcaacccggcgcagctcttacgaagactcaagccttccctcaatcaacgccctactacaagccgaagtcctaagccgccaaatcacttcacccgtatccggaataaacggcgacatccgagccaagaaaatagcctccatcgccgacgtctgcgaaagcatgaaagaacaactcctcgtcttagtcgaatgggccaaatacatccccgcattctgcgaactcccactggacgaccaagtagccctgctccgagcccacgccggcgaacacctcctcctcggcgccacgaaacgaagcatggtcttcaaagacgtccttctccttggcaacgactacatcgtcccacgccactgcccagagctagccgaaatgtcacgagtctcaatccgcatactcgacgagctagtactcccattccaagaactacaaatagacgacaacgaatacgcctatctcaaagcgatcatattcttcgaccccgacgccaaaggcctctccgacccaggcaaaatcaaacgcctccgctcccaagtccaggtgtcccttgaagactacataaacgatcgccaatacgactcacgaggaagattcggcgaactccttcttcttctccccacactccagtcaatcacatggcaaatgatcgaacagatacaattcatcaaacttttcggcatggccaaaatagacaacctcctacaggaaatgctactaggaggatccccatcagacgcaccccacgcccaccaccccctacacccccacctcatgcaagaacacatgggcaccaacgtcatagtcgccaacaccatgcccacccacctaagcaacggacaaatgtgcgagtggccccgcccacgcggccaagccgccacccccgaaacaccacaaccaagcccacccggcggctccggctccgaaccatacaaacttctcccaggcgctgtagccaccatcgtaaaaccactctcagccataccccaacccactatcaccaaacaagaggttatctagggactagtccctgttcccagagcccacttttttttctttttttgaaataaaatagcctgtctttcagatctaaaaaaaaaaaaaaaaaaaaaaaaaaaaaaaaaaaaaaaaaaaaaaaaaaaaaaaaaaaaaaaaaaaaaaaaaaaaaaaaaaaaaaaaaaaaaaaaaaaa

SEQ ID NO: 5438 - RNA, 1562 nt, synthetic construct
  misc_feature 1..1562: note = mRNA a-1 (A100) (opt11) from Homo sapiens__NP_000448.3__HNF4A(39-474)(E285Q)
  source 1..1562: mol_type = other RNA
aggagagtcccgcagtcggcgtccagcggctctgcttgttcgtgtgtgtgtcgttgcaggccttattcaagcttaccatggacacctcgccatccgaaggcacgaacctaaatgcccccaactcccttggcgtctccgcactctgcgccatctgcggcgaccgcgcaaccgggaaacactacggcgcctcatcctgcgacggctgcaaaggattcttccgtcgatctgtacgcaaaaaccacatgtactcttgccgattcagccgacaatgcgtcgttgacaaagacaaacgcaaccaatgccgctactgccgactcaaaaagtgcttccgcgcaggtatgaaaaaggaagcagtacaaaacgaacgagaccgcatttccacccgacgatcatcctatgaagactcctccctcccctcaatcaacgccctacttcaagccgaagtcctctcccgacaaataacctcccccgtcagcggcatcaacggcgacatcagagccaagaaaatcgcaagcatcgcagacgtatgcgagtcaatgaaagaacaactcctcgtcctagtcgaatgggcaaaatacatccccgccttctgcgaactcccactagacgaccaagtagccctcctccgcgcccacgccggagaacacctcctcctaggcgccactaaacgctccatggtcttcaaagacgtcctcctcctaggcaatgattacatcgttccccgacattgccccgaactagccgaaatgtcccgagtatccatccgcatcctcgacgaactcgtcctaccattccaagaactacaaatcgacgacaaccaatatgcatacctaaaagcaatcatcttcttcgaccccgacgccaaaggccttagcgacccaggcaaaatcaagcgactacgcagccaagtacaagtatccctagaagattacatcaacgatcgccaatacgactcccgcggccggttcggcgaactcctcctcctcctccccactctacaatccataacctggcaaatgatagaacaaatccaattcatcaagttattcggcatggccaaaatagacaacctcctccaagaaatgctactcggcggctccccatccgacgccccacacgcccatcaccccctccacccacaccttatgcaagaacacatgggcaccaacgtaatagtcgccaacaccatgccaacccacctctccaacggacaaatgtgcgaatggccacggccacgcggacaagccgccacaccggaaacaccacaacccagcccacccggcggttccggctccgaaccctacaaactactacccggcgcagtcgccaccatcgtcaaaccgctctcagccatccctcaaccaaccatcaccaaacaagaagtcatataaggactagtccctgttcccagagcccacttttttttctttttttgaaataaaatagcctgtctttcagatctaaaaaaaaaaaaaaaaaaaaaaaaaaaaaaaaaaaaaaaaaaaaaaaaaaaaaaaaaaaaaaaaaaaaaaaaaaaaaaaaaaaaaaaaaaaaaaaaaaaa

SEQ ID NO: 5439 - RNA, 1562 nt, synthetic construct
  misc_feature 1..1562: note = mRNA a-1 (A100) (opt11) from Homo sapiens__NP_000448.3__HNF4A(39-474)(T166E)
  source 1..1562: mol_type = other RNA
aggagagtcccgcagtcggcgtccagcggctctgcttgttcgtgtgtgtgtcgttgcaggccttattcaagcttaccatggacactagcccctccgaaggcaccaacctcaacgcaccaaactccttaggggtttcagccctatgcgccatatgcggcgatagagcaacaggaaaacactacggcgcctcatcatgcgatggctgcaaaggcttcttccgccgatccgtccgaaagaaccacatgtactcatgccgcttctcacgacaatgcgtcgtcgacaaagacaagcgaaaccaatgccgctactgccgcctaaagaaatgcttccgcgccggcatgaagaaagaagcagtacaaaacgaacgcgatcgcatctccacccgcagatcgtcctacgaagacagcagcctccccagcatcaacgccctcctccaagctgaagtcctctcccgccaaatcgaatcacccgtctcaggcatcaacggtgatatccgcgcaaagaaaatagcctccatcgccgacgtctgcgaatccatgaaagaacaactcctagtcctagtagaatgggccaaatacatcccagcattctgcgagctccccctggacgatcaagtcgctctcctccgcgcccacgccggcgaacacctcctactcggagcaaccaaacgcagtatggtattcaaagacgtcctactactcggtaacgactacatagtaccccgccactgcccagaactcgccgaaatgtcccgtgtctccatacgcatcctagacgaactcgtcctccccttccaagaactacaaatcgacgacaacgaatacgcctacctaaaagccatcatcttcttcgaccccgacgctaaaggcctctccgatccaggcaaaatcaaacgcctacgaagccaagtccaagtttccctcgaagactacatcaacgacagacaatacgactcccgcggccgcttcggcgaactactcctcctacttccaacactccaaagcataacgtggcaaatgatagaacaaatccaattcatcaaactcttcggcatggctaaaatagacaacctcctccaggaaatgctccttggaggctccccctccgacgcaccccacgcccaccacccactccaccctcacctcatgcaagaacacatgggcacaaacgtaatcgttgccaacactatgcccacccacctatccaacggacaaatgtgcgaatggccccgaccccgcggccaagccgccaccccagagactccccaaccctcgccacccggagggtccggctccgaaccctacaaactactccccggagcagtagcaacaatcgtaaaaccactctccgccataccccaacccactatcaccaaacaagaagtcatctaaggactagtccctgttcccagagcccacttttttttctttttttgaaataaaatagcctgtctttcagatctaaaaaaaaaaaaaaaaaaaaaaaaaaaaaaaaaaaaaaaaaaaaaaaaaaaaaaaaaaaaaaaaaaaaaaaaaaaaaaaaaaaaaaaaaaaaaaaaaaaa

SEQ ID NO: 5440 - RNA, 1562 nt, synthetic construct
  misc_feature 1..1562: note = mRNA a-1 (A100) (opt11) from Homo sapiens__NP_000448.3__HNF4A(39-474)(S148A)
  source 1..1562: mol_type = other RNA
aggagagtcccgcagtcggcgtccagcggctctgcttgttcgtgtgtgtgtcgttgcaggccttattcaagcttaccatggacacctctccctccgaaggcaccaacctcaacgcacccaactccctcggagtctccgccctctgcgccatctgtggcgaccgagcaaccgggaaacattacggcgcatcctcctgcgacggctgcaaaggcttcttccgccgatccgtcagaaaaaaccacatgtactcgtgccgattctcacgccaatgcgtagttgacaaagacaaacgcaaccaatgccgctactgccgccttaaaaaatgcttccgcgccggaatgaaaaaagaggccgtacaaaatgaacgcgaccgaatcagcacacgccgctcttcatacgaagactccgcactcccatccatcaacgccctactacaagccgaagtcctcagccggcaaatcacatccccagtgtccggtattaacggagacatacgcgccaagaaaatagcctccatagcagacgtctgcgagtcaatgaaagaacaactcctcgtactcgtagaatgggcaaaatacatccccgccttctgcgaacttcccctcgacgaccaagtcgcactcctccgcgcccacgccggcgaacatctcctactaggagccaccaaacgttcaatggtcttcaaagacgtcctgctactcggcaacgactatatcgtccccagacactgccccgaactagcagaaatgtccagagtctcaatacgaatcctagacgaactcgtcctcccattccaagaactacaaatcgacgacaacgaatacgcctacctcaaagccatcatcttctttgaccccgacgccaaagggctctccgaccccggaaaaatcaaacgcctgcgctcacaagtccaagtatccctcgaagactacatcaacgaccgccagtacgacagccgaggacgtttcggcgaactcctactcctcctcccaacactccagtccatcacctggcaaatgatcgaacaaatccaattcataaaactcttcggcatggccaaaatcgacaacctactccaagaaatgctcctcggcggatccccgtccgacgccccccacgcccaccaccccctacacccacacctcatgcaagaacacatgggaacaaacgtcatcgtagccaacaccatgcccacccacctctccaacggccaaatgtgcgaatggccccgcccacgcggccaagctgcaacaccagaaaccccacaaccatccccccccggcggcagcggctccgaaccctacaagcttctccccggtgccgtggccacaatagtcaaaccactctcggccattccccaaccaacaataacaaaacaagaagtgatctaaggactagtccctgttcccagagcccacttttttttctttttttgaaataaaatagcctgtctttcagatctaaaaaaaaaaaaaaaaaaaaaaaaaaaaaaaaaaaaaaaaaaaaaaaaaaaaaaaaaaaaaaaaaaaaaaaaaaaaaaaaaaaaaaaaaaaaaaaaaaaa

SEQ ID NO: 5441 - RNA, 1562 nt, synthetic construct
  misc_feature 1..1562: note = mRNA a-1 (A100) (opt11) from Homo sapiens__NP_000448.3__HNF4A(39-474)(S148E)
  source 1..1562: mol_type = other RNA
aggagagtcccgcagtcggcgtccagcggctctgcttgttcgtgtgtgtgtcgttgcaggccttattcaagcttaccatggacacctcaccctctgaaggaaccaacctcaacgcacccaactccctcggcgtatccgccctgtgcgccatctgcggtgatcgcgccaccggcaaacactacggggcctcaagctgcgacggctgcaaaggcttcttccgccgctctgtcaggaaaaaccacatgtacagctgccgattctcccgccaatgcgtagtcgataaagacaaacggaaccaatgccgatactgtcgcctcaagaaatgcttccgagcaggcatgaaaaaggaagcagtccaaaacgaacgggaccgaatctccactcgccgctcatcctacgaagacagcgaactaccctccattaatgccctcctccaagcagaagtactttcacgacaaataacctcccccgtctcaggcatcaacggcgacatcagagccaagaaaatcgcctccatcgccgacgtatgcgaatccatgaaagaacaactcctggtgctagtcgaatgggcaaaatatatccccgctttctgcgaactccccctagacgaccaagtcgcactcctccgagcccacgccggagagcacctcttactaggcgccaccaaacgaagcatggtcttcaaagacgtcctcctcctcggaaatgactacatcgtccccagacactgccccgaactcgccgaaatgtcacgagtctccatcagaatcctcgacgaactggtcctaccatttcaagaactacaaatcgatgacaacgaatacgcatacctcaaagcgatcatcttcttcgaccccgacgccaaagggctctccgacccaggcaaaatcaaacgcctcagaagccaggtccaagtctccctagaagactacataaacgaccgccagtatgactcccgcggcagattcggcgaactcctccttctacttccgaccctccaatccatcacctggcaaatgatcgaacaaatccaattcatcaaactcttcggcatggccaaaattgacaacctcctacaagaaatgctcctaggcggcagcccctcagacgcgccccacgcccaccacccactccacccacacctcatgcaagagcacatgggcaccaacgtcatagtagccaacaccatgcccacacacctctccaacggccagatgtgcgaatggccacgcccacgtggtcaagcagccacccccgaaaccccgcaaccatccccacccggcggatccggatccgaaccctacaaactcctacccggcgcagtcgccacaatcgtaaaacccctcagcgccatccctcagcccaccataaccaaacaagaagtcatctgaggactagtccctgttcccagagcccacttttttttctttttttgaaataaaatagcctgtctttcagatctaaaaaaaaaaaaaaaaaaaaaaaaaaaaaaaaaaaaaaaaaaaaaaaaaaaaaaaaaaaaaaaaaaaaaaaaaaaaaaaaaaaaaaaaaaaaaaaaaaaa

SEQ ID NO: 5442 - RNA, 1562 nt, synthetic construct
  misc_feature 1..1562: note = mRNA a-1 (A100) (opt11) from Homo sapiens__NP_000448.3__HNF4A(39-474)(S183A)
  source 1..1562: mol_type = other RNA
aggagagtcccgcagtcggcgtccagcggctctgcttgttcgtgtgtgtgtcgttgcaggccttattcaagcttaccatggacacctccccctcggagggaacaaacctcaacgcccccaactcactcggcgtcagcgcactctgcgccatatgcggcgaccgcgccaccggaaaacactacggagcctcaagctgcgacggctgcaaaggattcttcagacgcagcgtccggaaaaaccacatgtactcctgccgcttctcccgacaatgcgtcgtcgacaaagacaaacgaaaccaatgccgatactgccgcctaaaaaaatgcttccgcgctggaatgaaaaaagaagcagtacaaaacgaacgcgaccgcatatccaccagaagatcctcctacgaagactccagcctaccctcaatcaacgctctcctccaagcagaagtcctcagccgccaaatcacctcacccgtcagcggcatcaacggggacatccgcgccaaaaaaatcgccgcgattgccgacgtgtgcgaatccatgaaagagcaactcctcgtcctcgtagaatgggccaaatacatccccgccttctgcgaactacccctagacgaccaagtagcccttctacgcgcccacgccggggaacacctcctactcggcgcaaccaaaaggtcaatggtcttcaaagacgtcctcctactcggaaacgactacatcgtgcccaggcactgtccggaactcgccgaaatgtccagagtctcaatccggatactagacgaactcgtactccccttccaagaactacaaatcgacgacaacgaatacgcatacctaaaagccatcatcttcttcgacccagacgctaaaggactaagcgacccaggcaagatcaaacgactacgttcccaagtacaagtatccctggaagactacatcaacgaccgccaatacgactcacgaggtcgcttcggcgaactgctcctactcctacccaccctccaatccatcacatggcaaatgatcgaacaaatccaattcatcaaactcttcggtatggctaaaatcgacaacctactccaagaaatgcttctcggcggctccccatccgacgccccccacgcccaccacccactccacccccacctaatgcaagaacacatgggcaccaatgtcatagtcgccaacaccatgcccacccacctctcaaacggacaaatgtgcgaatggccccgaccacggggacaagcagccacaccagaaaccccccaacctagcccacccggaggctccggctcggaaccctacaaactcctccccggcgccgtagccaccatagtaaaacctttatccgccatcccacaacccaccatcacgaaacaggaagtaatataaggactagtccctgttcccagagcccacttttttttctttttttgaaataaaatagcctgtctttcagatctaaaaaaaaaaaaaaaaaaaaaaaaaaaaaaaaaaaaaaaaaaaaaaaaaaaaaaaaaaaaaaaaaaaaaaaaaaaaaaaaaaaaaaaaaaaaaaaaaaaa

SEQ ID NO: 5443 - RNA, 1562 nt, synthetic construct
  misc_feature 1..1562: note = mRNA a-1 (A100) (opt11) from Homo sapiens__NP_000448.3__HNF4A(39-474)(S183E)
  source 1..1562: mol_type = other RNA
aggagagtcccgcagtcggcgtccagcggctctgcttgttcgtgtgtgtgtcgttgcaggccttattcaagcttaccatggatacctccccctcggaagggaccaacctcaacgccccaaattcacttggagtctccgccctatgcgccatatgtggagaccgcgctaccggaaaacactatggcgcgtcatcctgcgacggatgcaaaggcttcttcagacgctcggtccgcaaaaaccacatgtactcctgccgattctcccgccaatgcgtcgtcgacaaagacaaaagaaaccaatgcaggtactgccgtctgaagaaatgcttccgcgccggaatgaagaaagaagccgtccaaaacgaacgcgaccgaatcagcaccagacgcagctcctacgaagactcctcactcccatcaatcaacgccctactccaagccgaagtcctctcccgccaaatcacctccccagtaagcggaatcaacggcgacatccgcgccaagaaaatagccgaaatagccgacgtctgcgaatcaatgaaagaacagctactcgtcctcgtcgaatgggccaaatacatacccgccttctgcgaactccctctcgacgaccaagtcgcactactcagagcccacgccggagaacacctactcctcggagccacgaaacgatccatggtattcaaagacgtactcctccttggtaacgattacatcgtcccaagacactgcccagaactcgccgaaatgtccagagtatcaatccgaatcctcgacgagctagtactcccctttcaggaactacaaatagatgacaacgaatacgcatacctaaaagccatcatcttctttgaccccgacgccaaaggcctctccgacccaggcaaaatcaaacgcctacgctcccaagttcaagtatccctcgaagactacatcaatgaccgccaatacgacagccgaggacgcttcggcgaactactcctgctactccccaccctacaatccatcacttggcaaatgatcgaacaaatccaattcatcaaactcttcggcatggccaaaatcgacaaccttctccaggaaatgctcctcggtggcagcccctccgacgcaccccacgcccaccaccccctccacccacacctcatgcaagaacacatgggcaccaacgtcatagtagcaaacaccatgcccacccacctatcaaacggacaaatgtgcgaatggccgcgcccgagaggacaagccgccacacccgaaacaccccaaccaagccctcccggcggctcaggttcagaaccctataaactcctacccggcgccgtagccaccatcgtaaaacccctcagcgccatcccccaacccaccatcaccaaacaagaagtgatataaggactagtccctgttcccagagcccacttttttttctttttttgaaataaaatagcctgtctttcagatctaaaaaaaaaaaaaaaaaaaaaaaaaaaaaaaaaaaaaaaaaaaaaaaaaaaaaaaaaaaaaaaaaaaaaaaaaaaaaaaaaaaaaaaaaaaaaaaaaaaa

SEQ ID NO: 5444 - RNA, 1562 nt, synthetic construct
  misc_feature 1..1562: note = mRNA a-1 (A100) (opt11) from Homo sapiens__NP_000448.3__HNF4A(39-474)(S461A)
  source 1..1562: mol_type = other RNA
aggagagtcccgcagtcggcgtccagcggctctgcttgttcgtgtgtgtgtcgttgcaggccttattcaagcttaccatggacacatcccccagcgaaggcaccaatctaaacgcacccaactccctcggggtctcagcactatgcgccatctgcggagatcgcgctactggcaaacactacggagcctcctcctgcgacggctgcaaaggcttcttccgaagatcagtccgcaaaaaccacatgtactcatgccgcttctctcgccaatgcgtcgtcgacaaagacaaacgaaaccagtgccgctactgccgcctaaagaaatgctttcgcgccggcatgaagaaagaagcagtacaaaacgaacgcgaccgcatctccacccgccggtcaagctacgaggactcatcactcccatcaatcaacgctctcctccaagcagaagtccttagccgacaaatcacatcccccgtttccggaatcaacggcgacatccgagcaaagaaaatcgcctctatcgcagacgtatgcgaatccatgaaagaacaactcctagtcctagtcgaatgggcaaaatatatacccgccttctgcgaactgcccctagacgatcaagtcgcactactccgagcccacgccggcgagcacctcctgctcggcgccacaaaacgatccatggtattcaaagacgtactactcctcgggaacgactacatcgtaccccgccactgccccgagctcgccgaaatgtcacgtgtctcaattcgcatactagacgagctagtcctccccttccaagaactacaaatagacgacaacgaatacgcatacctaaaagccatcatcttcttcgaccccgatgccaaaggactatccgaccccggcaaaatcaaacgccttcgttcacaagtgcaagtctcgctcgaagactacatcaacgaccgccaatacgactccagaggccgattcggagaactcctactcctcctccccaccctccaatccatcacatggcaaatgatagaacaaatccaattcataaaactcttcggcatggccaaaatcgacaacctgctccaagaaatgctcctcggcggatcaccctccgacgccccacacgcccaccaccccctacacccccaccttatgcaagaacacatgggaaccaacgtcatcgtcgccaacacaatgcccacacacctatcaaacggacaaatgtgcgagtggcctcgcccccgcggccaagcagccacacccgaaacaccccagccctccccacccggcggctccggctcggaaccctacaaacttctcccaggcgccgtcgccaccatcgtaaaaccactcgccgcaataccccaaccaaccatcaccaaacaagaggtaatctaaggactagtccctgttcccagagcccacttttttttctttttttgaaataaaatagcctgtctttcagatctaaaaaaaaaaaaaaaaaaaaaaaaaaaaaaaaaaaaaaaaaaaaaaaaaaaaaaaaaaaaaaaaaaaaaaaaaaaaaaaaaaaaaaaaaaaaaaaaaaaa

SEQ ID NO: 5445 - RNA, 1562 nt, synthetic construct
  misc_feature 1..1562: note = mRNA a-1 (A100) (opt11) from Homo sapiens__NP_000448.3__HNF4A(39-474)(S461E)
  source 1..1562: mol_type = other RNA
aggagagtcccgcagtcggcgtccagcggctctgcttgttcgtgtgtgtgtcgttgcaggccttattcaagcttaccatggacacctctccatccgaaggcacaaacctcaacgcacccaactccctcggcgtctccgcactttgcgcaatctgcggcgaccgagccaccggcaaacattacggagcctccagctgcgacggctgcaagggattcttccgccgcagcgtccgcaaaaaccacatgtactcgtgccgcttctcacgacagtgcgtagtcgacaaagacaaacgcaaccaatgcagatactgcagacttaaaaagtgcttccgcgcgggaatgaagaaagaagccgtccaaaacgaacgagatcgcatctccacccgccggagctcatacgaagactcatcactaccatcaataaacgccctcctacaagccgaagtcctatcccgccaaataacctcccccgtctctggcatcaacggagacatccgcgccaagaaaatcgcaagcatcgccgacgtctgcgaatcaatgaaagagcaactactcgtcctagtagaatgggcaaaatacataccagccttctgcgaactccccctagacgaccaagtcgcgctactccgagcccacgcaggagaacaccttctcctaggcgcaaccaaacgctccatggtatttaaagacgtcctactcctgggcaacgactacatagtcccccgccattgcccagaactcgccgaaatgtcacgcgtatcgatacgcatcctcgacgagctagtcctccccttccaagaactacaaatagacgacaacgaatacgcctacttgaaagccataatcttcttcgacccagacgccaaaggcctctccgacccaggcaaaataaaacgcctacgcagccaggtacaggtcagcctcgaagactatatcaacgaccgtcaatacgactcccgaggccgattcggagaactcctcctactcctaccaaccctccaatcaatcacctggcaaatgatcgaacaaatacaattcatcaaactgttcggcatggcaaaaatagacaacctacttcaagaaatgctcttaggaggctccccctccgacgccccacacgcccaccaccccctccacccacacctcatgcaagaacacatggggaccaacgtaatagtcgccaacaccatgcccacccacctatccaacggccaaatgtgcgaatggccccgcccgcgcggccaagccgccacccctgaaacaccacaaccctcccctcccggcggatcaggctccgaaccctacaaactccttcccggcgccgtagccactatcgtcaaacccctcgaagccatacctcaaccaaccatcaccaaacaagaggtcatctaaggactagtccctgttcccagagcccacttttttttctttttttgaaataaaatagcctgtctttcagatctaaaaaaaaaaaaaaaaaaaaaaaaaaaaaaaaaaaaaaaaaaaaaaaaaaaaaaaaaaaaaaaaaaaaaaaaaaaaaaaaaaaaaaaaaaaaaaaaaaaa

SEQ ID NO: 5446 - RNA, 1562 nt, synthetic construct
  misc_feature 1..1562: note = mRNA a-1 (A100) (opt11) from Homo sapiens__NP_000448.3__HNF4A(39-474)(S142A_S143A_S313A)
  source 1..1562: mol_type = other RNA
aggagagtcccgcagtcggcgtccagcggctctgcttgttcgtgtgtgtgtcgttgcaggccttattcaagcttaccatggacacctcaccctctgaagggaccaacctaaacgcaccaaactcactcggagtcagcgccctatgcgccatctgcggcgaccgcgcaaccggaaaacactacggcgcctcctcttgcgacggctgcaaaggcttcttccgaagatccgtcagaaaaaaccatatgtacagctgccgcttctcacgacaatgcgtcgtcgacaaagacaaaagaaaccaatgcagatattgccgactcaaaaaatgctttcgagccggcatgaaaaaggaagcagtccaaaacgaacgcgaccgcatttccacccgcagagccgcctacgaagacagctccctccccagcatcaacgcactactccaagctgaagtattatcccgccaaatcacctccccagtctccggcatcaacggcgacatacgggccaaaaaaatcgcctcaatcgccgacgtctgcgaatccatgaaagaacaactcctagtcctagtcgaatgggccaaatacatacccgcattctgcgaactacctttagacgaccaagtcgccctcttacgagcccacgccggcgaacatctactgcttggcgccaccaaacgatccatggttttcaaagacgtactactcctcggaaacgactacatcgtcccacgtcactgcccagaactagccgaaatgtcccgcgtctcaatccgcatcctcgacgaactcgtactcccctttcaagaactacaaatcgacgacaacgagtacgcctacctcaaagccatcatcttcttcgaccccgacgcaaaaggcctctccgaccccggcaaaattaaacgacttagagcacaagtacaagtcagcctagaagactacataaatgaccgccaatacgacagcagaggccgcttcggcgagctcctactcctcctccccaccctacaatcaattacctggcagatgatcgaacaaatacaattcataaaacttttcggaatggccaaaatcgacaacctactccaagaaatgctcctcggcggctcccccagcgacgccccccacgcacaccaccccctacacccccacctaatgcaagagcacatgggaaccaacgtcatagtagccaacacaatgcccactcacctcagcaacggccaaatgtgcgaatggccccgcccccgaggacaagccgccacccccgaaaccccccaaccgagcccccccggcggctccggctccgaaccctacaaactcctccctggcgccgtagccacgatagtaaaaccgctctccgccatcccccaaccgacaataacgaaacaagaagtaatctaaggactagtccctgttcccagagcccacttttttttctttttttgaaataaaatagcctgtctttcagatctaaaaaaaaaaaaaaaaaaaaaaaaaaaaaaaaaaaaaaaaaaaaaaaaaaaaaaaaaaaaaaaaaaaaaaaaaaaaaaaaaaaaaaaaaaaaaaaaaaaa

SEQ ID NO: 5447 - RNA, 1562 nt, synthetic construct
  misc_feature 1..1562: note = mRNA a-1 (A100) (opt11) from Homo sapiens__NP_000448.3__HNF4A(39-474)(S142A_S143A_S313A_K458R )
  source 1..1562: mol_type = other RNA
aggagagtcccgcagtcggcgtccagcggctctgcttgttcgtgtgtgtgtcgttgcaggccttattcaagcttaccatggacacatccccctccgagggcaccaacctcaacgcccccaactctctcggcgtctctgccctctgcgccatctgcggcgaccgcgccaccggaaaacactacggagccagctcatgcgacggctgcaaaggattctttcgacgctccgttagaaaaaaccacatgtactcatgccgtttctctcgccaatgcgtcgtcgacaaagacaaacgtaaccagtgccgctactgccgcctaaaaaaatgcttccgcgcaggcatgaaaaaagaagccgtccaaaacgagagagaccgcatatccacccgccgagccgcctacgaagactcttcactaccgtccataaacgccctcctacaagccgaagtcctatcacgacaaataacctcccccgtcagcggcatcaacggcgacatcagagccaagaaaatagcctctatagcagacgtatgcgaatcaatgaaagaacaactcctagtactagtcgaatgggccaaatacattcccgccttctgcgaactgccactcgacgaccaagtggccctactccgtgcccacgccggcgaacatttactcctcggcgccaccaaacgatcaatggtattcaaagacgtactactcctcggcaacgactacatagtcccccgccactgccccgaactcgccgaaatgtcacgtgtctctatccggatcctagacgaactcgtcctccccttccaagaactccaaatcgacgacaacgaatacgcctacctaaaagccatcatattcttcgatcccgacgccaagggtctctccgacccaggaaaaatcaaacgcctacgcgcacaagtacaagtatccctcgaagactacatcaacgaccgacaatacgacagccgcggccgattcggcgaactactccttctcctccccacactacaatcaataacctggcaaatgatcgaacaaatccagttcataaaactctttggcatggccaaaatagacaacctcctccaggaaatgctcctcggaggaagcccctccgacgccccccacgcccaccacccactccacccccacctcatgcaagagcacatgggcaccaacgtcatcgtcgccaacaccatgcccacacacctatcaaacggccaaatgtgtgaatggcccagacctcgcggccaagccgccacacccgaaaccccacaaccctcccccccggggggctcaggctccgaaccctacaaactcctcccaggtgccgtcgccacaatcgtacgacccctctccgccatccctcaaccaacaataaccaaacaagaagtcatctaaggactagtccctgttcccagagcccacttttttttctttttttgaaataaaatagcctgtctttcagatctaaaaaaaaaaaaaaaaaaaaaaaaaaaaaaaaaaaaaaaaaaaaaaaaaaaaaaaaaaaaaaaaaaaaaaaaaaaaaaaaaaaaaaaaaaaaaaaaaaaa

SEQ ID NO: 5448 - RNA, 1562 nt, synthetic construct
  misc_feature 1..1562: note = mRNA a-1 (A100) (opt11) from Homo sapiens__NP_000448.3__HNF4A(39-474)(S142A_S143A_S167A_S313A _S378A_T429A_T432A_S436A_K458R)
  source 1..1562: mol_type = other RNA
aggagagtcccgcagtcggcgtccagcggctctgcttgttcgtgtgtgtgtcgttgcaggccttattcaagcttaccatggacacatcgccaagcgaaggaaccaaccttaacgccccaaactccctgggcgtctccgccctttgcgccatctgcggagaccgcgccacaggcaaacactatggcgcctccagctgcgacggctgcaaaggcttcttccgacgctcagtacggaaaaaccacatgtactcatgccgcttctcacgccaatgcgtcgtcgacaaagacaaacgcaaccaatgccgctactgccgactcaaaaaatgcttccgcgcaggcatgaaaaaggaagccgtccaaaacgaacgcgaccgtatctcaacccgacgtgctgcatacgaagactcatccctcccctccatcaacgccctactccaggccgaagtcctgagtcgacaaatcacagcccccgtctcaggcatcaacggcgacatccgagcaaagaaaatcgcctctatagccgacgtctgcgaatcaatgaaagaacaactcctcgtcctcgtagaatgggccaaatacatccccgcattctgcgaactacccctcgacgaccaagtcgccctactaagagcccacgccggcgaacaccttctgcttggcgccacaaaacgcagcatggtattcaaagacgtactactcctcggcaacgactacatcgtaccccgacactgccccgaactcgccgaaatgtcccgcgtctccatacgcatcctagacgaactggtcctccccttccaggaactccaaatcgacgacaacgaatacgcctacctcaaagccatcatattcttcgacccagacgcaaaaggcctcagcgaccccggcaaaatcaaaagactccgcgcccaagtacaagtcagcctagaagattacataaacgaccgccaatacgatagcagaggccgattcggcgaactcctcctactcctacccacactacaatcaatcacctggcaaatgatagaacaaatccaattcatcaagctattcggcatggcaaaaattgacaacctactacaagaaatgctcctcggcggcgccccaagcgacgcaccacacgcccaccaccccctccacccgcacctcatgcaagaacacatgggcaccaacgtcatcgtcgccaacacaatgcccacacacctctccaatggacaaatgtgcgaatggccacgcccacgaggccaagcggccgcgcccgaagccccacaacctgccccgcccggaggctctggaagcgaaccctacaaactactccccggcgcagtcgccacgatagtccgcccactatccgccatcccccagcccacaataaccaaacaagaagtcatataaggactagtccctgttcccagagcccacttttttttctttttttgaaataaaatagcctgtctttcagatctaaaaaaaaaaaaaaaaaaaaaaaaaaaaaaaaaaaaaaaaaaaaaaaaaaaaaaaaaaaaaaaaaaaaaaaaaaaaaaaaaaaaaaaaaaaaaaaaaaaa

SEQ ID NO: 5449 - RNA, 1562 nt, synthetic construct
  misc_feature 1..1562: note = mRNA a-1 (A100) (opt11) from Homo sapiens__NP_000448.3__HNF4A(39-474)(S142A_S143A_S148A_S167A _S313A_S378A_T429A_T432A_S436A_K458R)
  source 1..1562: mol_type = other RNA
aggagagtcccgcagtcggcgtccagcggctctgcttgttcgtgtgtgtgtcgttgcaggccttattcaagcttaccatggacacctccccatccgaaggcaccaacctcaacgcccccaactcactaggagtctccgccctttgcgccatctgcggcgaccgcgccacaggaaaacactacggcgcgtcaagctgcgatggatgcaaaggtttcttccgtcgttccgtccgcaaaaaccacatgtattcctgccgattctcgcgccaatgcgtcgtcgacaaagacaaacgaaaccaatgccgatactgccgcctcaaaaagtgcttccgcgccggcatgaagaaagaagccgtccaaaacgaacgcgacagaatatcaacccgacgagccgcctacgaagactcagccctcccctcaataaatgccctcctccaagcagaggtcctttccagacagatcaccgcccccgtctccggcatcaacggcgacatcagagccaagaaaatcgcctccatcgccgacgtctgcgaatccatgaaagaacaacttctagttctcgtcgaatgggccaaatacatccccgccttctgcgaactaccccttgacgaccaagtcgctctcctgcgcgcccacgccggcgaacacctccttctcggagcaactaaacgctccatggtgttcaaagacgtcctcctcctcggcaacgactacatcgtcccccgacactgccccgaactagctgaaatgtcacgcgtcagcatcagaatcctcgacgaactcgtcctccccttccaagaactccaaatcgatgacaacgagtacgcctatcttaaagccatcatattcttcgacccagacgcaaaaggtctctccgaccccggcaaaataaaacgactccgcgcccaagtccaagtttccctcgaagactacatcaacgaccgacaatacgattcccgcggccgattcggcgaactcctcctactccttcccaccctccagtccataacatggcaaatgatcgaacaaatccaattcataaaactcttcggcatggccaaaatagacaacctcctccaagagatgctactcggcggtgctccatccgacgccccacacgcacaccaccccctccacccccacctcatgcaagagcacatgggcaccaacgtcatagtagcaaacaccatgcctacccacctatccaacggacaaatgtgcgaatggccccgcccacggggccaagccgccgcccccgaagccccacaacccgccccacccggaggatccggcagcgaaccctacaaactactacccggtgccgtcgccacaatcgtccgccccctatccgccataccacagcccaccatcaccaaacaagaagtcatatagggactagtccctgttcccagagcccacttttttttctttttttgaaataaaatagcctgtctttcagatctaaaaaaaaaaaaaaaaaaaaaaaaaaaaaaaaaaaaaaaaaaaaaaaaaaaaaaaaaaaaaaaaaaaaaaaaaaaaaaaaaaaaaaaaaaaaaaaaaaaa

SEQ ID NO: 5450 - RNA, 1562 nt, synthetic construct
  misc_feature 1..1562: note = mRNA a-1 (A100) (opt11) from Homo sapiens__NP_000448.3__HNF4A(39-474)(K106R_K108R_K126R_K127R _S142A_S143A_S148A_S167A_S313A_S378A_T429A_T432A_S436A_K458 R)
  source 1..1562: mol_type = other RNA
aggagagtcccgcagtcggcgtccagcggctctgcttgttcgtgtgtgtgtcgttgcaggccttattcaagcttaccatggacacctcaccatccgaaggcacaaacctaaacgcccccaactcacttggcgtttcggccctctgcgccatatgcggagaccgcgccaccggcaaacactacggagcatcctcctgcgacggctgtaaaggcttcttcagacgatccgtacgcaaaaaccacatgtactcctgccgcttcagcagacaatgcgtcgtcgaccgcgaccgccgcaaccaatgccgctactgccgcctaaagaaatgcttccgcgcaggcatgcgccgagaagcagtccaaaacgaacgagaccgaataagcacccgcagagccgcgtacgaagactccgccctcccatcaatcaacgcacttctacaagccgaagtactctcccgccaaataaccgccccagtatccggaatcaacggcgacatccgcgccaagaaaatcgcttccatagcagacgtctgtgaatccatgaaagagcaactcctcgtcctcgtcgagtgggccaaatacatccccgccttctgcgagctacccctcgacgaccaagtcgccctcctccgagcccacgctggcgaacacctcctactcggcgccaccaaaagatccatggttttcaaagacgtactccttctgggaaacgactacatcgtacccaggcactgccccgagctagccgaaatgtccagagtctcaatccgcatactcgacgagctcgtccttccctttcaagaacttcaaatagacgacaacgaatacgcatacctgaaagccatcatcttcttcgaccccgacgccaaaggactatccgacccaggcaaaatcaaacgcctacgagcacaagtacaagtctccctagaagactacataaacgaccgccaatacgactcgagaggccgcttcggcgaactactccttctcctccctaccctacaaagcatcacctggcaaatgatcgaacaaatccaattcataaaactcttcggaatggccaaaatcgacaatttactccaggaaatgttactcggcggcgcaccatccgacgcaccccacgcccaccaccccctacacccccacctcatgcaagaacacatgggaaccaatgtcatagtcgccaacacaatgcctacacatctctccaacggccaaatgtgcgaatggccgcgtccccgaggacaagcagccgcccccgaagcaccccagcccgccccgcccggcggatccggatcagaaccctacaaactcctcccaggcgccgtcgcaaccatcgtccgccccctctcagcaatcccccaacccaccatcaccaaacaagaagtcatctaaggactagtccctgttcccagagcccacttttttttctttttttgaaataaaatagcctgtctttcagatctaaaaaaaaaaaaaaaaaaaaaaaaaaaaaaaaaaaaaaaaaaaaaaaaaaaaaaaaaaaaaaaaaaaaaaaaaaaaaaaaaaaaaaaaaaaaaaaaaaaa

SEQ ID NO: 5451 - RNA, 1562 nt, synthetic construct
  misc_feature 1..1562: note = mRNA a-1 (A100) (opt11) from Homo sapiens__NP_000448.3__HNF4A(39-474)(S142A_S143A_S148A_T166A _S167A_S313A_S378A_T429A_T432A_S436A_K458R)
  source 1..1562: mol_type = other RNA
aggagagtcccgcagtcggcgtccagcggctctgcttgttcgtgtgtgtgtcgttgcaggccttattcaagcttaccatggacacctccccctcagaaggaaccaacctaaatgcccccaactctctcggcgtctccgctctctgcgccatctgcggcgaccgagccaccggaaaacactacggagcctcctcctgcgacgggtgcaaaggcttcttcagaagatccgtccgcaaaaaccacatgtactcatgccggttctcccgacaatgcgtagtcgacaaagacaaacgcaaccaatgccgctactgccgcctcaaaaaatgctttcgcgccggcatgaagaaagaagcagtacaaaacgaaagagacagaatctcaactcgcagagccgcctacgaagactcggcgctcccctctatcaacgccctgcttcaagccgaagtcctctcacgccaaatcgccgcacccgtatccggaatcaacggcgatatccgcgcaaaaaaaatcgcatccatcgccgacgtctgcgaatccatgaaggaacaactgctagtcctcgtagaatgggccaaatacatccctgccttctgtgaactccccctagacgatcaagtcgccctcctacgcgcccacgccggcgagcacctactacttggagccaccaaacgttctatggtcttcaaagacgtactcttactcggcaacgactacatagtcccccgccactgcccagaactggccgaaatgagccgcgtctcaatacgaatcctagacgaactcgtgctaccattccaagaactacaaatcgacgacaacgaatacgcatacctaaaagctattatcttcttcgaccccgacgccaaaggcctatccgaccccggcaaaataaaacgcctgcgagcccaagtacaagtaagcctcgaagactacatcaacgaccgacagtacgactcccgaggccgcttcggcgaactcctacttctcctccccaccctacaatccatcacctggcaaatgatagaacaaatccaattcatcaaactcttcggaatggcaaaaatcgataacctgctccaagaaatgctcctcggcggagccccaagcgatgcaccacacgcacaccacccactacacccacacctcatgcaagaacacatgggaaccaacgtcatagtcgccaacacaatgccaacccacctatccaacggccaaatgtgcgaatggccccgcccccgcggtcaagcagcagctcccgaagcacctcaaccagccccccccggaggctccggctccgaaccttacaaactcctcccaggagccgtcgccacaatcgtaagacccctctcagccatcccccaaccaaccatcacaaaacaagaagtgatataaggactagtccctgttcccagagcccacttttttttctttttttgaaataaaatagcctgtctttcagatctaaaaaaaaaaaaaaaaaaaaaaaaaaaaaaaaaaaaaaaaaaaaaaaaaaaaaaaaaaaaaaaaaaaaaaaaaaaaaaaaaaaaaaaaaaaaaaaaaaaa

SEQ ID NO: 5452 - RNA, 1562 nt, synthetic construct
  misc_feature 1..1562: note = mRNA a-1 (A100) (opt11) from Homo sapiens__NP_000448.3__HNF4A(39-474)(S87A_S142A_S143A_S148A_ T166A_S167A_S313A_S378A_T429A_T432A_S436A_K458R)
  source 1..1562: mol_type = other RNA
aggagagtcccgcagtcggcgtccagcggctctgcttgttcgtgtgtgtgtcgttgcaggccttattcaagcttaccatggacacctcaccatcagaaggtacaaacctcaacgcccctaactcactcggcgtatctgcactatgcgcaatatgcggagaccgtgccactggcaaacactacggagcctcatcatgtgacggctgcaaaggcttcttccgacgtgcagtccgcaaaaaccatatgtactcctgccgattctcccgacaatgcgtcgtagacaaagacaaacgaaaccaatgccggtactgccgcctaaagaaatgcttccgcgccgggatgaagaaagaagccgtacaaaacgaacgagatcgcatctccacacgccgagccgcctacgaagactccgccctcccctccatcaacgccctactccaggccgaagtactgtcgcgccaaatcgccgcgccagtttccggaataaacggcgacatccgcgccaagaaaatcgcctcaatcgcagacgtatgcgaatccatgaaagaacaactcctcgtcctcgtagaatgggccaaatacatccccgcattctgcgaactacccctagatgaccaagtagcactattacgcgctcacgccggagaacacctcctcctcggagccactaaacgctccatggtcttcaaagacgtcctcctcctcggcaacgactacatcgtaccccgccactgccccgaactcgcagaaatgtcaagggtctccataagaatcctagacgagctagtcctaccgttccaagaactccaaatcgacgacaatgaatacgcatacctcaaagccataatcttcttcgacccagacgccaaaggcctctcagaccccggcaaaatcaaacgactacgcgcccaggtccaagtctccctagaagactacatcaacgacagacaatacgacagccgagggagattcggcgaactcctcctactcctccccaccctccaatcaataacatggcaaatgatcgaacaaatccagttcatcaaactcttcggcatggccaaaatcgacaacctactccaagaaatgctcctcggaggcgccccaagcgacgcaccccacgcacaccaccccctccacccacacctcatgcaagaacacatgggaaccaacgtcatagtagcaaacacaatgcccacccacctctcaaacggccaaatgtgcgaatggccccgcccacgaggccaagcagcggcccccgaagctccccaacccgcccctcccggagggtccggcagcgaaccctacaaactcctcccaggcgcagtagccaccatcgtacgcccgctttccgcaatacctcagcccacaatcacaaaacaagaagtaatataaggactagtccctgttcccagagcccacttttttttctttttttgaaataaaatagcctgtctttcagatctaaaaaaaaaaaaaaaaaaaaaaaaaaaaaaaaaaaaaaaaaaaaaaaaaaaaaaaaaaaaaaaaaaaaaaaaaaaaaaaaaaaaaaaaaaaaaaaaaaaa

SEQ ID NO: 5453 - RNA, 1562 nt, synthetic construct
  misc_feature 1..1562: note = mRNA a-1 (A100) (opt11) from Homo sapiens__NP_000448.3__HNF4A(39-474)(S87A_K106R_K108R_K126R_ K127R_S142A_S143A_S148A_T166A_S167A_S313A_S378A_T429A_T432A _S436A_K458R)
  source 1..1562: mol_type = other RNA
aggagagtcccgcagtcggcgtccagcggctctgcttgttcgtgtgtgtgtcgttgcaggccttattcaagcttaccatggacacctccccatccgaaggtaccaacttaaacgcccccaactccttaggcgtctccgccctctgcgcaatctgcggcgaccgagctacaggtaaacactacggcgcatcaagctgtgacggctgcaaaggcttcttccgacgagccgtccgcaaaaaccacatgtactcatgcagattctcccgacaatgcgtcgtggacagagaccgacgaaaccaatgccgctactgccgcctcaaaaaatgcttccgcgccggcatgcgacgtgaagcagtccaaaacgaacgtgatcgcataagcactagacgcgccgcctacgaagactccgccctgccctccatcaacgccctactacaagccgaagtccttagcagacaaatagccgccccagtctccggaataaacggagacatacgtgccaaaaaaatagcatccatcgccgacgtatgcgaaagcatgaaagaacaactccttgtcctagtagaatgggctaaatacatccccgcattctgcgaactccccctagacgaccaagtagccctcctccgagcacacgccggcgaacacctcctactcggcgccacaaaaagaagcatggtcttcaaagacgtcctacttctaggaaacgactacatcgtccctcgccactgccccgaactcgccgagatgagtagagtctctatcagaatcctcgacgaactcgtactcccattccaagaactacaaatagacgacaacgaatacgcctacctcaaagcgatcatcttcttcgaccccgacgccaaaggcctatcagaccccggcaaaatcaaaagactccgcgcccaagtacaagtctccctagaagactacatcaacgaccgccagtacgacagccgaggccgattcggcgaactacttctactcctcccaacactacaatcaatcacctggcagatgatcgaacaaatccaattcatcaaactattcggcatggccaaaatagacaaccttctacaagaaatgctcctaggcggcgcccccagcgacgcaccacacgcacaccacccccttcacccccacctaatgcaagagcacatgggcaccaacgtcattgtagccaacacaatgcccacccacctctcgaacggtcaaatgtgcgaatggccccgcccacgcggccaagcagccgcacccgaagcaccccaaccagccccacccggaggatccggttcggaaccctacaaactcctacccggcgccgtggccacaatagtaagacccctctcagcaatcccccaacccaccatcaccaaacaagaagtcatctaaggactagtccctgttcccagagcccacttttttttctttttttgaaataaaatagcctgtctttcagatctaaaaaaaaaaaaaaaaaaaaaaaaaaaaaaaaaaaaaaaaaaaaaaaaaaaaaaaaaaaaaaaaaaaaaaaaaaaaaaaaaaaaaaaaaaaaaaaaaaaa

SEQ ID NO: 5454 - RNA, 1562 nt, synthetic construct
  misc_feature 1..1562: note = mRNA a-1 (A100) (opt11) from Homo sapiens__NP_000448.3__HNF4A(39-474)(S87A_K106R_K108R_K126R_ K127R)
  source 1..1562: mol_type = other RNA
aggagagtcccgcagtcggcgtccagcggctctgcttgttcgtgtgtgtgtcgttgcaggccttattcaagcttaccatggacaccagcccatctgaaggtaccaacctcaacgcaccaaactccctcggcgtttcagctctatgcgccatatgcggagaccgcgccaccggcaaacactacggagcctcctcttgcgacggctgcaaaggcttcttccgcagagccgtacgcaaaaaccacatgtacagctgtagattttcccgccaatgcgtcgtcgaccgcgaccgccgcaaccagtgcagatattgccgactcaagaaatgcttccgcgcaggaatgcgccgcgaagccgtacaaaacgaacgcgaccgcatctccacacgccgctcatcttacgaagactcctccctaccaagcatcaacgcactacttcaagcagaagtcctatcccgacaaatcacctcccccgtctcaggcataaacggcgacataagggcaaagaaaatcgcctccatagccgacgtatgcgaatcaatgaaagaacaactcctagtcctcgtcgaatgggccaaatacatccccgccttctgcgaactgcccctcgacgaccaagtagcacttctccgcgcccacgccggcgaacacctcctactcggcgccaccaaacgttccatggtcttcaaagacgtcctcctacttggtaacgactacatcgtaccccgccactgccctgaactcgcagaaatgtcccgcgtctcaataagaatcctcgacgagctagttctccccttccaagaactacaaatcgacgacaacgaatacgcctacctcaaagccatcatatttttcgaccccgacgccaaaggcctttccgaccccggcaaaataaaacgcctccgctctcaagtccaggtcagcctcgaagactacatcaacgaccgccaatacgactctcgtggccgcttcggagaactactactactcctccccacactacaatccatcacctggcaaatgatcgaacaaatccaattcatcaaactcttcggcatggccaaaattgacaacctactccaagaaatgctcctaggcggctccccatccgacgcaccccacgcccaccaccccctccacccccacctcatgcaagaacacatgggaaccaacgtaatcgtcgcaaacacaatgccaacccacctatccaacggtcaaatgtgcgaatggccacgaccccgcggccaagcagctacccccgaaaccccacaaccctcaccaccaggaggcagcggttccgaaccatacaaactcctacccggggccgtcgccaccatcgtaaaacccctctccgccatcccccaacctacaatcaccaaacaagaagtcatctaaggactagtccctgttcccagagcccacttttttttctttttttgaaataaaatagcctgtctttcagatctaaaaaaaaaaaaaaaaaaaaaaaaaaaaaaaaaaaaaaaaaaaaaaaaaaaaaaaaaaaaaaaaaaaaaaaaaaaaaaaaaaaaaaaaaaaaaaaaaaaa

SEQ ID NO: 5455 - RNA, 1562 nt, synthetic construct
  misc_feature 1..1562: note = mRNA a-1 (A100) (opt11) from Homo sapiens__NP_000448.3__HNF4A(39-474)(S87A_K106R_K108R_K126R_ K127R_S142A_S143A_S148A_T166A_S167A_S313A_S378A_T429A_T432A _S436A_K458R_S461A)
  source 1..1562: mol_type = other RNA
aggagagtcccgcagtcggcgtccagcggctctgcttgttcgtgtgtgtgtcgttgcaggccttattcaagcttaccatggacacctctcccagcgaaggcacaaacctcaacgcccccaactcactcggggtctccgccctctgcgccatatgcggtgaccgtgcaaccggcaaacactacggcgcctcatcctgcgacggctgcaaaggattcttccgacgcgccgtacgcaaaaaccacatgtactcctgcagattctcacgccaatgcgtcgtggaccgagaccgccgcaaccaatgccgttactgccgcctcaagaaatgcttccgagccggaatgcgaagagaagccgtacaaaacgaacgcgaccgcatctccacacgacgagcagcctacgaagactccgccctaccctccataaacgcactcctccaagccgaagtactctcccgacaaatagccgcaccagtctccggcataaacggagacatccgagcaaagaaaatagcctcaatcgccgacgtatgcgaatcaatgaaagaacaacttctcgtcctcgtcgaatgggccaaatatatacccgccttctgcgaactccccctagacgaccaagtggcccttcttcgcgcccacgccggcgaacacctcctactcggagccaccaaacgctccatggtcttcaaagacgtactactcctcggtaacgactacatcgtcccacgacactgccccgaactagccgaaatgtcacgcgtctccatccgcatcctagacgaactcgtactcccattccaagaactccaaatcgacgacaacgaatacgcatacctcaaagccatcatcttcttcgacccagacgccaaaggcctatccgacccaggaaaaataaaacgcttacgcgcacaagtccaagtctccctcgaagactacatcaacgaccgtcagtacgacagccgggggagattcggcgaactgctactactacttcccaccctccaatccatcacctggcaaatgatagaacaaatacaattcatcaaactattcggcatggccaaaatcgacaacctcctacaagaaatgctactcggcggcgccccctccgacgcaccccacgcccaccaccccctccacccccatctaatgcaagaacacatgggcacaaacgtcatcgttgccaacacaatgcccacccacctttccaacggccaaatgtgcgaatggccacgcccccgtggccaagccgccgcccccgaagccccacaaccggccccaccaggtggatccggctcggaaccctacaaactactcccaggagcggtcgctaccatcgtacgccctttggccgccatcccccaacccacaatcaccaaacaagaagttatctagggactagtccctgttcccagagcccacttttttttctttttttgaaataaaatagcctgtctttcagatctaaaaaaaaaaaaaaaaaaaaaaaaaaaaaaaaaaaaaaaaaaaaaaaaaaaaaaaaaaaaaaaaaaaaaaaaaaaaaaaaaaaaaaaaaaaaaaaaaaaa

SEQ ID NO: 5456 - RNA, 1562 nt, synthetic construct
  misc_feature 1..1562: note = mRNA a-1 (A100) (opt11) from Homo sapiens__NP_000448.3__HNF4A(39-474)(S87A_K106R_K108R_K126R_ K127R_S142A_S143A_S148A_T166A_S167A_S313A_S378A_T429A_T432A _S436A_K458R_S461E)
  source 1..1562: mol_type = other RNA
aggagagtcccgcagtcggcgtccagcggctctgcttgttcgtgtgtgtgtcgttgcaggccttattcaagcttaccatggacacctcaccatccgaaggcacaaacctcaacgccccgaactccctaggagtctcagccctctgcgccatatgcggcgaccgagccacaggcaaacactacggcgcctcatcgtgcgacggatgcaaaggattcttccgacgagctgtccgcaaaaaccacatgtactcctgccgcttctcccgccaatgcgtcgttgaccgcgaccggcgcaaccaatgcagatactgccgactcaagaaatgcttccgcgcaggcatgcgacgagaagccgtccaaaacgaacgcgaccgcatctcaaccagacgcgccgcctacgaagactctgcactccccagcatcaacgccctcctgcaagccgaagtattatcccgacagatcgccgcccccgtatccggcatcaacggcgacatccgcgccaagaaaatcgcctccatcgcagatgtctgcgaaagcatgaaagaacaattactcgtactcgtcgaatgggcaaaatacatccccgcattctgcgaactccccctcgacgaccaagtcgccctattacgcgcccacgcaggagaacaccttctcttaggcgcaacgaaacgcagcatggtcttcaaagacgtcctactcctcggcaacgactacatcgtcccccgtcactgccccgaactcgccgaaatgtcccgcgtatccatccgcatcctcgacgaactcgtcctaccattccaagaactccaaatcgacgacaacgaatacgcctacctcaaagcaatcatcttcttcgaccccgacgcaaaaggactatccgaccccggcaaaatcaaacgcctccgcgcacaagtccaagtctccctcgaagactacataaacgacagacaatacgacagccgaggcagattcggagaacttctcctcctcctccccacactacaatccatcacatggcaaatgatcgaacaaatacaattcatcaaactcttcggcatggcaaaaatcgacaacctgctccaagaaatgctacttggcggagcccccagcgacgccccacacgcacaccaccccctccacccccacctcatgcaagagcacatgggcaccaacgtcatcgtagccaacacaatgcccacacacctctccaacggccaaatgtgcgaatggccccgtccccgcggccaagccgcagcccccgaagcaccacaacccgcacctccaggcggcagcggctctgaaccctacaaactcctccccggcgcagtcgccacaatcgtccgccccctagaggccataccccaacccacaattaccaaacaagaggtaatctaaggactagtccctgttcccagagcccacttttttttctttttttgaaataaaatagcctgtctttcagatctaaaaaaaaaaaaaaaaaaaaaaaaaaaaaaaaaaaaaaaaaaaaaaaaaaaaaaaaaaaaaaaaaaaaaaaaaaaaaaaaaaaaaaaaaaaaaaaaaaaa

SEQ ID NO: 5457 - RNA, 1562 nt, synthetic construct
  misc_feature 1..1562: note = mRNA a-1 (A100) (opt11) from Homo sapiens__NP_000448.3__HNF4A(39-474)(S87A_K106R_K108R_K126R_ K127R_S142A_S143A_S148E_T166A_S167E_S313A_S378E_T429E_T432E _S436E_K458R_S461E)
  source 1..1562: mol_type = other RNA
aggagagtcccgcagtcggcgtccagcggctctgcttgttcgtgtgtgtgtcgttgcaggccttattcaagcttaccatggacacaagccccagcgaagggaccaacctcaacgcgccaaacagcctaggcgtctcagccctatgtgccatctgcggagacagagccaccggcaaacactacggagcctcatcctgcgacggatgcaaaggcttcttccgacgcgccgtccgcaaaaaccacatgtactcctgccgtttctcccgacaatgcgtcgtagaccgcgaccgccgcaaccaatgccgctattgccgcctaaagaaatgcttccgcgccggcatgcgacgcgaagccgtccagaacgagcgcgaccgaatctccacacgtcgcgctgcctacgaagactctgaactcccctcgataaacgcactgctccaagccgaagttctatcacgccaaatagccgaacccgtcagcggcatcaacggcgacatccgcgccaagaaaatcgcatcaatcgcagatgtatgcgaatccatgaaagaacagctcctcgtcctcgtagaatgggctaaatacatccccgccttctgtgagctccccctcgacgaccaggtagccctgctaagagcccatgccggcgaacacctcctccttggcgccactaaacgatcaatggtattcaaagacgtcctcctactaggaaacgactacatagtccccagacactgccccgaacttgcagaaatgagccgagtctccatccgcatcttagacgaactcgtcctcccattccaagaactccagatcgacgacaacgaatacgcataccttaaagcaataatcttcttcgaccccgacgccaaaggactatcagaccccgggaaaattaaaagactccgagcacaagtccaagtctcactcgaagactacatcaacgatcgccaatacgactcacgcggacgatttggcgaactcctcctgttactccccaccctacaaagcatcacctggcaaatgatcgaacaaatccagttcataaaactcttcggaatggccaaaatcgacaacctgctccaagaaatgctcctcggcggcgaaccctccgacgcaccccacgcccaccaccccctccacccacacctaatgcaagaacacatgggaaccaacgtcatagtcgccaacaccatgccaacacacctctcgaacggccaaatgtgcgaatggccccgaccacgcggccaagccgctgaacccgaagaaccccaacccgaacccccaggaggctccggctccgaaccctacaaactcctccctggcgccgtcgcaaccatagtacgccccctagaagctatcccacaacccacaataaccaaacaagaagtcatctgaggactagtccctgttcccagagcccacttttttttctttttttgaaataaaatagcctgtctttcagatctaaaaaaaaaaaaaaaaaaaaaaaaaaaaaaaaaaaaaaaaaaaaaaaaaaaaaaaaaaaaaaaaaaaaaaaaaaaaaaaaaaaaaaaaaaaaaaaaaaaa

SEQ ID NO: 5458 - RNA, 1562 nt, synthetic construct
  misc_feature 1..1562: note = mRNA a-1 (A100) (opt11) from Homo sapiens__NP_000448.3__HNF4A(39-474)(S87A_K106R_K108R_K126R_ K127R_S142A_S143A_S148A_T166A_S167A_K179R_K180R_S313A_S378A _T429A_T432A_S436A_K458R_S461E)
  source 1..1562: mol_type = other RNA
aggagagtcccgcagtcggcgtccagcggctctgcttgttcgtgtgtgtgtcgttgcaggccttattcaagcttaccatggacacatccccctcagaaggaaccaacctcaacgcacccaactccctcggagtttccgccctatgcgcaatctgcggcgatcgagccaccggcaaacactacggcgcctcgtcttgcgacggctgcaaaggcttcttccgccgcgccgtcagaaaaaaccacatgtactcatgccggttctccagacaatgcgtcgtcgaccgagaccgccgaaaccaatgcaggtactgccgcctgaaaaaatgcttccgcgcaggcatgcgccgcgaagccgtccaaaacgagcgagaccgaatctcaacgcgacgcgccgcctacgaagactcagccctcccatccatcaacgcactactacaagccgaagtactatcccgacaaatagccgcaccagtctcaggaatcaacggagacatacgcgccagacgaatagcctccattgccgacgtatgcgaaagcatgaaagaacaactactcgttctcgtcgagtgggccaaatacattcccgctttctgcgaattacccctagacgaccaagtcgccctcctcagagcccacgcaggcgaacacctcctactcggagccaccaaacgatccatggtcttcaaagacgtcttactcctcggcaacgactacatcgtccccagacactgtcccgaactcgccgaaatgtcccgcgtctccatccgaatcctcgacgaactcgtactccccttccaggaactccaaatcgacgacaacgaatacgcctacctaaaagccatcatttttttcgaccctgatgccaaaggcctctctgaccccggcaaaatcaaacgactacgcgcccaagtccaagtctcactcgaagactacatcaacgatcgccagtacgactcccgaggccgcttcggtgaactcctcctcctcctgcccaccctacaatcaataacttggcaaatgatcgaacaaatacaattcatcaaactcttcggcatggccaaaattgacaacctcctacaagaaatgcttctcggcggagcacccagcgatgccccacacgcccaccaccccctccacccacacctcatgcaagaacacatgggcaccaacgtaatcgtcgccaacacaatgcccacacacctctccaacggacaaatgtgcgaatggccccgcccccgaggccaagcagccgccccagaagcaccccaacccgccccacccggaggctcaggctctgaaccctacaaactcctcccaggagcagtcgcaaccatcgtccggcccctcgaagcaatcccccaacccacaatcacaaaacaagaggtaatctagggactagtccctgttcccagagcccacttttttttctttttttgaaataaaatagcctgtctttcagatctaaaaaaaaaaaaaaaaaaaaaaaaaaaaaaaaaaaaaaaaaaaaaaaaaaaaaaaaaaaaaaaaaaaaaaaaaaaaaaaaaaaaaaaaaaaaaaaaaaaa

SEQ ID NO: 5459 - RNA, 1562 nt, synthetic construct
  misc_feature 1..1562: note = mRNA a-1 (A100) (opt11) from Homo sapiens__NP_000448.3__HNF4A(39-474)(S87A_K106R_K108R_K126R_ K127R_S142A_S143A_S148A_T166A_S167A_K300R_K307R_K309R_S313A _S378A_T429A_T432A_S436A_K458R_S461E)
  source 1..1562: mol_type = other RNA
aggagagtcccgcagtcggcgtccagcggctctgcttgttcgtgtgtgtgtcgttgcaggccttattcaagcttaccatggacacatccccatcagaagggaccaacctaaacgcccccaactccctcggcgtctccgcactctgcgcaatctgcggcgacagagccaccggaaaacactacggcgcctcctcatgcgacggatgcaaaggattcttccgaagagccgtccgaaaaaaccacatgtactcatgccgattctcgcgccaatgcgtcgtcgatcgcgacagacgcaaccaatgccgatactgcagacttaaaaaatgcttccgtgctggcatgcgacgcgaagctgtccaaaatgagcgcgaccgcatatctacccgaagagccgcctacgaagactcagcactaccctcaatcaacgccctactccaggccgaagtcctatcccgacaaatcgcagcccccgtgtccggcataaacggtgacatccgcgccaaaaaaatcgcctcaatagccgacgtctgtgaaagcatgaaagaacaactactagttctcgtcgaatgggcaaaatacatacccgcattctgcgaactcccactagacgaccaagtggccctcctccgagcccatgcaggagaacacctcctcctcggggccacaaaacgctccatggtgttcaaagacgtactactcctaggaaacgactacatcgtaccccgccactgccccgaactagctgaaatgtcacgcgtctcgatccgcatcctcgacgaactcgtcctaccattccaagaactgcaaatcgacgacaacgagtacgcgtacctaaaagcaataatattcttcgaccccgacgcccgcggcctctccgaccccggaagaatcaggcgactccgcgcccaagtccaagtaagcctcgaagactacatcaacgaccgccaatacgactcacgaggcagattcggcgaactactcctcctcctcccaacacttcaatcaatcacctggcaaatgatcgaacaaatccaattcatcaagctattcggcatggccaaaatcgacaacctcctacaagaaatgctactgggaggcgccccctccgacgccccccacgcccaccaccccctacatccacacctcatgcaggaacatatgggaaccaacgtcatcgtcgcaaacaccatgcccacccacctttccaacggccaaatgtgcgaatggccccgcccccgcggccaagcagccgcccccgaagccccccaacccgcaccacccggcggcagtggctcggaaccctacaaactcctccccggcgccgtagccaccatcgtccgaccactagaagcaataccacaacccaccataaccaaacaagaagtaatctaaggactagtccctgttcccagagcccacttttttttctttttttgaaataaaatagcctgtctttcagatctaaaaaaaaaaaaaaaaaaaaaaaaaaaaaaaaaaaaaaaaaaaaaaaaaaaaaaaaaaaaaaaaaaaaaaaaaaaaaaaaaaaaaaaaaaaaaaaaaaaa

SEQ ID NO: 5460 - RNA, 1562 nt, synthetic construct
  misc_feature 1..1562: note = mRNA a-1 (A100) (opt11) from Homo sapiens__NP_000448.3__HNF4A(39-474)(S87A_K106R_K108R_K126R_ K127R_S142A_S143A_S148A_T166A_S167A_S313A_S378A_T429A_T432A _S436A_K447R_K458R_S461E_K470R)
  source 1..1562: mol_type = other RNA
aggagagtcccgcagtcggcgtccagcggctctgcttgttcgtgtgtgtgtcgttgcaggccttattcaagcttaccatggacacatccccctccgaaggaacaaacctaaacgcccccaactccctcggtgtgtccgccttatgcgccatctgcggagaccgcgccacaggcaaacactacggcgcatcaagctgcgacggctgtaaaggattcttccgccgcgccgtgcgcaaaaaccacatgtactcatgccgcttctcccgccagtgcgtcgtcgaccgcgaccgccgcaaccaatgccgatactgccgcctcaagaaatgcttccgagccggcatgcgacgagaagcagtccaaaacgaacgcgatcgcatctccacaagacgcgcagcatatgaagactcggccctcccatcaatcaacgccctcctacaagccgaagtactatcccgccaaatcgccgcccccgtctccggcatcaacggcgacatacgcgctaagaaaatcgcctcaatagcagacgtctgcgaatcaatgaaagaacaactgctcgtactcgtggaatgggccaaatacatcccagcgttctgcgaactccccctcgacgaccaagtagcattactacgcgcccacgccggcgaacaccttctactaggagcaaccaaacgatccatggtcttcaaagacgtcctgctcctaggaaatgactacatcgtcccccgccattgccctgaactagcagaaatgtcgcgcgtctcaatccgaatcctcgacgaactcgttctaccattccaagaactacaaatcgacgacaacgaatacgcctaccttaaagcaataatcttcttcgacccagatgcaaaaggcctctccgaccccggcaaaatcaaacgcctacgagcacaagtccaagtctctctcgaagactacatcaacgaccgccaatacgactcacgtggccgcttcggcgaactcctcctcctcctacccacccttcaatcaatcacatggcaaatgatcgaacaaatacaattcataaaactattcggcatggccaaaatcgacaacctcctccaagaaatgctactcggcggtgccccgtccgacgcaccccacgcccaccaccccctccatccacacctcatgcaggaacacatgggaaccaacgtcatcgtcgccaacaccatgcccactcacctcagcaacggacaaatgtgcgaatggccaagaccgcgaggacaagccgccgcccccgaagccccacaacctgcacccccaggaggctccggatcagaaccttaccgcctcctccccggcgccgtcgccacaatcgtacgcccactcgaagccatcccccaaccaaccatcacccgccaagaagtcatctaaggactagtccctgttcccagagcccacttttttttctttttttgaaataaaatagcctgtctttcagatctaaaaaaaaaaaaaaaaaaaaaaaaaaaaaaaaaaaaaaaaaaaaaaaaaaaaaaaaaaaaaaaaaaaaaaaaaaaaaaaaaaaaaaaaaaaaaaaaaaaa

SEQ ID NO: 5461 - RNA, 1562 nt, synthetic construct
  misc_feature 1..1562: note = mRNA a-1 (A100) (opt11) from Homo sapiens__NP_000448.3__HNF4A(39-474)(S87A_K106R_K108R_K126R_ K127R_S142A_S143A_S148A_T166A_S167A_K179R_K180R_K234R_K300R _K307R_K309R_S313A_S378A_T429A_T432A_S436A_K447R_K458R_S461 E_K470R)
  source 1..1562: mol_type = other RNA
aggagagtcccgcagtcggcgtccagcggctctgcttgttcgtgtgtgtgtcgttgcaggccttattcaagcttaccatggacacctccccctcggaaggcaccaacctcaacgcccctaactcactcggcgtttccgctctctgcgccatctgcggagaccgagcgacaggaaaacactacggagcctcctcatgcgatggctgcaaaggcttcttccgccgcgcagtacgcaaaaaccacatgtactcatgcagattctcaagacaatgcgtcgtcgaccgcgaccgacgcaaccaatgccgatactgccgcctcaagaaatgcttccgcgccggcatgcgccgagaagcagtccaaaacgaacgcgacagaataagtactcgccgagccgcatacgaagacagcgccctaccatccatcaacgcactcctccaagccgaagtcctatcacgacaaatcgcagctcccgtttccggcatcaacggcgatatccgcgcaagacgaatagcaagcattgcagacgtctgcgaatcaatgaaagaacaactcctcgtcctcgtcgaatgggccaaatacatccccgcattctgcgaactccccctcgacgaccaagtcgccctactaagagcccacgccggcgaacacctcctcctaggcgctacccgacgctccatggtattcaaagacgtcctactcctaggtaacgactacatcgtaccccgccactgccccgaactcgcagaaatgagcagagtttcaatccgcatcctagacgagctagttctccccttccaagaacttcaaatcgacgataacgaatacgcctacctaaaagccatcatcttcttcgacccagacgcccgaggcctctccgacccaggacgaataagaagactacgcgcccaagtacaagtttccctcgaagattacatcaacgacagacagtacgactccagaggccgattcggtgaactcctcctgctactccccaccctccaaagcataacatggcaaatgatcgaacaaatccaattcatcaaactcttcggcatggccaaaatcgacaacctcctacaagaaatgctactgggcggtgcaccctccgacgccccacacgctcaccaccccctccacccccatcttatgcaagaacacatgggaaccaatgtcatcgtcgcaaacacaatgcccacccacctaagcaacggccaaatgtgcgaatggcccagaccacgcggccaagcagccgcccccgaagccccacaaccagcccctcccggaggatcaggatctgaaccctaccgactactccccggagccgtcgccaccatcgtccgccccctcgaagcaataccacaaccgaccataacgcgccaagaagtcatctaaggactagtccctgttcccagagcccacttttttttctttttttgaaataaaatagcctgtctttcagatctaaaaaaaaaaaaaaaaaaaaaaaaaaaaaaaaaaaaaaaaaaaaaaaaaaaaaaaaaaaaaaaaaaaaaaaaaaaaaaaaaaaaaaaaaaaaaaaaaaaa

SEQ ID NO: 5462 - RNA, 1562 nt, synthetic construct
  misc_feature 1..1562: note = mRNA a-1 (A100) (opt11) from Homo sapiens__NP_000448.3__HNF4A(39-474)(S87A_S95A_S99A_K106R_K1 08R_K126R_K127R_S142A_S143A_S148A_T166A_S167A_S313A_S378A_T 429A_T432A_S436A_K458R_S461E)
  source 1..1562: mol_type = other RNA
aggagagtcccgcagtcggcgtccagcggctctgcttgttcgtgtgtgtgtcgttgcaggccttattcaagcttaccatggatacctccccatccgaaggaaccaacctcaacgccccaaactcactaggcgtctccgccctctgcgccatctgcggcgaccgcgccaccggcaaacactacggcgcctcttcctgtgacggatgcaaaggctttttccggcgcgcagtccgcaaaaaccacatgtacgcctgccgtttcgcccgacagtgcgtagtcgaccgcgaccgtcgaaaccaatgcagatactgccgactaaagaaatgcttccgcgccggcatgcgcagagaagcagtacaaaacgaacgagaccgcatctcaacccgccgtgcggcatatgaagactcggccctaccatccatcaacgccctgctccaagccgaagtattatcccgccaaatcgcagcccccgttagtggaatcaacggcgacatccgagccaagaaaatcgcctccatagccgacgtctgcgagagcatgaaagaacaactcctcgtactcgtagaatgggcaaaatacatacccgccttctgcgaactccccctagacgaccaagtagccctactccgagcccacgccggtgaacatctactcctcggagccaccaaaagatccatggtattcaaagacgtcctcctcctaggcaacgactacatcgtcccccgccactgccccgaactcgccgaaatgtcccgcgtctcaatccgcatactggacgagctcgtactccccttccaagaactacaaatcgacgacaacgaatacgcttacctaaaagcaatcatcttcttcgacccagacgcgaaaggcctatcagatcccggcaaaatcaaacgcctacgcgcacaagtacaagtatcccttgaagactacataaacgaccgacaatacgacagccggggccgtttcggagaacttctcctcctcctacccacactccaatccattacctggcaaatgatagaacaaatccaattcatcaaactcttcggaatggccaagatcgacaacctcctccaagaaatgctactcggaggcgcccccagtgacgctccccacgcccatcaccccctccacccccacctaatgcaagaacacatgggcaccaacgtcatagtcgccaacaccatgccaacccacctctcaaacggccaaatgtgcgaatggcctcgccccagaggccaagcggccgcccccgaagccccacaacccgccccacccggcggctccggatcagaaccatacaaactcctacccggcgccgtagccactatcgtacgaccactcgaagccatcccacaacccacaatcaccaaacaagaagtcatctaaggactagtccctgttcccagagcccacttttttttctttttttgaaataaaatagcctgtctttcagatctaaaaaaaaaaaaaaaaaaaaaaaaaaaaaaaaaaaaaaaaaaaaaaaaaaaaaaaaaaaaaaaaaaaaaaaaaaaaaaaaaaaaaaaaaaaaaaaaaaaa

SEQ ID NO: 5463 - RNA, 1562 nt, synthetic construct
  misc_feature 1..1562: note = mRNA a-1 (A100) (opt11) from Homo sapiens__NP_000448.3__HNF4A(39-474)(S87A_K106R_K108R_K126R_ K127R_S138A_T139A_S142A_S143A_S148A_T166A_S167A_S313A_S378A _T429A_T432A_S436A_K458R_S461E)
  source 1..1562: mol_type = other RNA
aggagagtcccgcagtcggcgtccagcggctctgcttgttcgtgtgtgtgtcgttgcaggccttattcaagcttaccatggacacctctccttccgaaggcaccaacctcaacgccccaaactccctcggcgtctccgccttgtgcgccatctgcggcgaccgagccacaggaaaacactacggagcctcctcctgcgatggctgcaaaggcttcttccgccgcgcagtaagaaaaaaccacatgtactcatgccgcttctcccgccagtgcgtcgtagaccgcgaccgccgcaaccaatgccgctactgccgcctcaaaaaatgcttccgagccggaatgcgaagagaagccgtccaaaacgaacgcgaccgcatcgccgcccgacgggccgcatacgaggatagcgccctcccaagcatcaatgctcttctccaagccgaggtcctttcccgtcaaatcgcagcccccgtatccggaatcaacggagacatacgcgccaaaaaaatcgcaagcatcgccgacgtctgcgaaagcatgaaagaacaactcctcgtactcgtcgaatgggccaaatacataccagccttctgcgaactacccctcgacgatcaagtagccctcctacgagcccacgccggagaacacctcctacttggcgccacaaaacgaagcatggttttcaaggacgtcctcctcctcggcaacgactacatagtaccccgccactgccccgaactagcagaaatgtcccgggtatcgatccgcatactagacgaactagtcctcccctttcaagaactccaaatcgatgacaacgaatacgcttacctgaaagcaataatcttcttcgaccctgacgccaaaggcctctccgacccaggaaaaataaaacgcctccgcgcccaagtacaagtctccctagaagactacataaacgaccgacaatacgactcccgaggacgattcggcgaactactattattactacctacactacaatccatcacctggcaaatgatcgaacaaatccaattcatcaaactattcggcatggccaaaatcgacaacctactccaagaaatgctcctaggcggcgcccccagcgacgccccacacgcccaccaccccctccacccccacctaatgcaagaacacatgggcacaaacgtcatagtagccaacaccatgcccacccacctcagcaacggccaaatgtgcgagtggccccgaccacgcggccaagccgcagcccctgaagccccccaacctgccccccccggcggctccggctccgaaccatacaaactactccccggggccgtcgccacaatcgtcagacccctcgaagcaatcccccaacctacaatcaccaaacaagaagtaatttaaggactagtccctgttcccagagcccacttttttttctttttttgaaataaaatagcctgtctttcagatctaaaaaaaaaaaaaaaaaaaaaaaaaaaaaaaaaaaaaaaaaaaaaaaaaaaaaaaaaaaaaaaaaaaaaaaaaaaaaaaaaaaaaaaaaaaaaaaaaaaa

SEQ ID NO: 5464 - RNA, 1562 nt, synthetic construct
  misc_feature 1..1562: note = mRNA a-1 (A100) (opt11) from Homo sapiens__NP_000448.3__HNF4A(39-474)(S87A_S95A_S99A_K106R_K1 08R_K126R_K127R_S138A_T139A_S142A_S143A_S148A_T166A_S167A_S 313A_S378A_T429A_T432A_S436A_K458R_S461E)
  source 1..1562: mol_type = other RNA
aggagagtcccgcagtcggcgtccagcggctctgcttgttcgtgtgtgtgtcgttgcaggccttattcaagcttaccatggacacctcccccagcgaaggcaccaacctaaacgcccctaactcactcggagtgtccgcactatgcgcaatctgcggggaccgcgccaccggcaaacactacggcgcctccagctgcgacggctgcaaaggcttcttccgccgagccgtccgcaagaaccacatgtacgcctgccgcttcgctcgccaatgcgtcgtagaccgagaccgcagaaaccaatgcagatactgcagactcaagaaatgcttccgcgccggcatgcgacgcgaagccgtacaaaacgaacgcgaccgcatcgccgctcgtcgagcagcctatgaagactcagcccttccctcaataaacgcactactccaagccgaagtcctcagccgacaaatcgccgccccagtctcaggcatcaacggcgacatccgcgccaagaaaatagcctccatcgcggacgtctgcgagtccatgaaagaacaactcctagttctggtcgaatgggctaaatacatccccgcattctgcgaactcccactcgacgaccaagtagccctactccgagcccacgcaggagaacacctactcctaggagccacaaaacgttccatggtatttaaagacgtcctcctactaggcaacgactacatcgtcccccgccactgccccgaactcgccgaaatgtcccgcgtctccatccgcatcctagacgagctcgtactcccattccaagaactccaaatagacgacaacgaatacgcctacctaaaagccatcatcttcttcgatccagacgcaaaaggcctctcagacccaggcaaaatcaaaagacttagagcccaagtccaagtatcactcgaagactacatcaacgaccgacaatacgactcccgcggaaggttcggcgaactcctcctcctcctccccacactacaatccatcacctggcaaatgatagaacaaattcaattcataaaactattcggcatggccaagatagacaacctcctccaagaaatgctcctcggcggagccccctccgacgcaccccacgcccaccaccccctacacccccacctgatgcaagaacacatgggaacaaacgtaatcgtagccaacaccatgccgacacatctctctaacggccaaatgtgcgaatggccacgcccacgcggccaagccgcagcccccgaagcaccacaaccagccccacccggaggctccggatccgaaccctacaagttgctccccggcgccgtagccacaatcgtccgccccctagaggccataccacaacccacaatcacaaaacaagaagtcatataaggactagtccctgttcccagagcccacttttttttctttttttgaaataaaatagcctgtctttcagatctaaaaaaaaaaaaaaaaaaaaaaaaaaaaaaaaaaaaaaaaaaaaaaaaaaaaaaaaaaaaaaaaaaaaaaaaaaaaaaaaaaaaaaaaaaaaaaaaaaaa

SEQ ID NO: 5465 - RNA, 1562 nt, synthetic construct
  misc_feature 1..1562: note = mRNA a-1 (A100) (opt28) from Homo sapiens__NP_000448.3__HNF4A(39-474)
  source 1..1562: mol_type = other RNA
aggagagtcccgcagtcggcgtccagcggctctgcttgttcgtgtgtgtgtcgttgcaggccttattcaagcttaccatggacacatctcccagtgagggcactaacctgaatgcccctaactcactgggggtgagcgctctgtgcgcaatctgcggagacagggccaccggcaaacactacggggcttcctcttgtgatggatgcaagggctttttcagacgcagcgtccggaaaaatcatatgtacagttgccgattttcaaggcagtgcgtggtggacaaggacaagagaaaccagtgccgctattgtcggctgaaaaagtgcttcagggcaggaatgaaaaaggaagccgtccagaatgagagagatcgaatttccacacggcgcagctcttacgaagacagctccctgccaagtatcaacgctctgctgcaggcagaggtgctgtcaaggcagatcactagccccgtgtctgggattaacggcgatatcagagccaagaaaattgcttccatcgcagacgtctgcgaaagcatgaaggagcagctgctggtgctggtggagtgggccaaatacatccctgcattttgcgaactgccactggacgatcaggtcgctctgctgcgggcccacgcaggagagcatctgctgctgggcgctaccaagcgaagtatggtgttcaaggacgtgctgctgctggggaatgactatattgtccccaggcactgccctgaactggccgagatgtcaagagtgtctatccgcatcctggatgaactggtgctgccattccaggagctgcagattgacgataacgaatacgcatacctgaaagctatcatctttttcgaccccgacgccaagggactgtccgatcctggcaaaattaagcggctgaggagccaggtccaggtgagtctggaggactatatcaatgacagacagtacgatagccgagggcggtttggagaactgctgctgctgctgccaacactgcagtccattacctggcagatgatcgagcagatccagttcattaaactgttcggcatggcaaagatcgacaacctgctgcaggagatgctgctgggagggtcaccctctgatgcccctcatgctcaccacccactgcatccccacctgatgcaggaacatatgggcactaatgtgatcgtcgcaaacacaatgcctacccacctgagcaatggacagatgtgtgagtggccacgccccaggggccaggccgcaactcctgaaaccccacagccctcccctccagggggatctggcagcgagccctacaagctgctgcctggagctgtggccacaattgtgaaaccactgagtgcaatcccccagcctaccattactaagcaggaagtcatctgaggactagtccctgttcccagagcccacttttttttctttttttgaaataaaatagcctgtctttcagatctaaaaaaaaaaaaaaaaaaaaaaaaaaaaaaaaaaaaaaaaaaaaaaaaaaaaaaaaaaaaaaaaaaaaaaaaaaaaaaaaaaaaaaaaaaaaaaaaaaaa

SEQ ID NO: 5466 - RNA, 1562 nt, synthetic construct
  misc_feature 1..1562: note = mRNA a-1 (A100) (opt28) from Homo sapiens__NP_000448.3__HNF4A(39-474)(S313A)
  source 1..1562: mol_type = other RNA
aggagagtcccgcagtcggcgtccagcggctctgcttgttcgtgtgtgtgtcgttgcaggccttattcaagcttaccatggacacatctccctcagagggcactaacctgaatgcccctaacagtctgggggtgagcgctctgtgcgcaatctgcggagacagggccaccggcaaacactacggggcttcctcttgtgatggatgcaagggctttttcagacgcagcgtccggaaaaatcatatgtactcatgccgatttagtaggcagtgcgtggtggacaaggacaagagaaaccagtgccgctattgtcggctgaaaaagtgcttcagggcaggaatgaaaaaggaagccgtccagaatgagagagatcgaatttccacacggcgcagctcttacgaagacagctccctgccatcaatcaacgctctgctgcaggcagaggtgctgagtaggcagatcactagccccgtgtctgggattaacggcgatatcagagccaagaaaattgcatccatcgctgacgtctgcgaaagcatgaaggagcagctgctggtgctggtggagtgggccaaatacatccctgcattttgcgaactgccactggacgatcaggtcgctctgctgcgggcccacgcaggagagcatctgctgctgggcgctaccaagcgatcaatggtgttcaaggacgtgctgctgctggggaatgactatattgtccccaggcactgccctgaactggccgagatgagtagagtgtctatccgcatcctggatgaactggtgctgccattccaggagctgcagattgacgataacgaatacgcatacctgaaagctatcatctttttcgaccccgacgccaagggactgtccgatcctggcaaaattaagcggctgagggcacaggtccaggtgagcctggaggactatatcaatgacagacagtacgatagccgagggcggtttggagaactgctgctgctgctgccaacactgcagtccattacctggcagatgatcgagcagatccagttcattaaactgttcggcatggccaagatcgacaacctgctgcaggagatgctgctgggagggtcaccctctgatgctcctcatgcacaccacccactgcatccccacctgatgcaggaacatatgggcactaatgtgatcgtcgccaacacaatgcctacccacctgagtaatggacagatgtgtgagtggccacgccccaggggccaggcagctactcctgaaaccccacagcccagccctccagggggatccggctctgagccctacaagctgctgcctggagcagtggccacaattgtgaaaccactgagcgctatcccccagcctaccattactaagcaggaagtcatctgaggactagtccctgttcccagagcccacttttttttctttttttgaaataaaatagcctgtctttcagatctaaaaaaaaaaaaaaaaaaaaaaaaaaaaaaaaaaaaaaaaaaaaaaaaaaaaaaaaaaaaaaaaaaaaaaaaaaaaaaaaaaaaaaaaaaaaaaaaaaaa

SEQ ID NO: 5467 - RNA, 1562 nt, synthetic construct
  misc_feature 1..1562: note = mRNA a-1 (A100) (opt28) from Homo sapiens__NP_000448.3__HNF4A(39-474)(S313E)
  source 1..1562: mol_type = other RNA
aggagagtcccgcagtcggcgtccagcggctctgcttgttcgtgtgtgtgtcgttgcaggccttattcaagcttaccatggacacatctccctcagagggcactaacctgaatgcccctaacagtctgggggtgagcgctctgtgcgcaatctgcggagacagggccaccggcaaacactacggggcttcctcttgtgatggatgcaagggctttttcagacgcagcgtccggaaaaatcatatgtactcatgccgatttagtaggcagtgcgtggtggacaaggacaagagaaaccagtgccgctattgtcggctgaaaaagtgcttcagggcaggaatgaaaaaggaagccgtccagaatgagagagatcgaatttccacacggcgcagctcttacgaagacagctccctgccatcaatcaacgctctgctgcaggcagaggtgctgagtaggcagatcactagccccgtgtctgggattaacggcgatatcagagccaagaaaattgcatccatcgctgacgtctgcgaaagcatgaaggagcagctgctggtgctggtggagtgggccaaatacatccctgcattttgcgaactgccactggacgatcaggtcgctctgctgcgggcccacgcaggagagcatctgctgctgggcgctaccaagcgatcaatggtgttcaaggacgtgctgctgctggggaatgactatattgtccccaggcactgccctgaactggccgagatgagtagagtgtctatccgcatcctggatgaactggtgctgccattccaggagctgcagattgacgataacgaatacgcatacctgaaagctatcatctttttcgaccccgacgccaagggactgtccgatcctggcaaaattaagcggctgagggagcaggtccaggtgagcctggaagactatatcaatgacagacagtacgatagccgagggcggtttggagagctgctgctgctgctgccaacactgcagtccattacctggcagatgatcgagcagatccagttcattaaactgttcggcatggcaaagatcgacaacctgctgcaggaaatgctgctgggagggtcaccctctgatgcccctcatgctcaccacccactgcatccccacctgatgcaggagcatatgggcactaatgtgatcgtcgcaaacacaatgcctacccacctgagtaatggacagatgtgtgaatggccacgccccaggggccaggccgcaactcctgagaccccacagcccagccctccagggggatccggctctgaaccctacaagctgctgcctggagctgtggcaacaattgtgaaaccactgagcgccatcccccagcctaccattactaagcaggaggtcatctgaggactagtccctgttcccagagcccacttttttttctttttttgaaataaaatagcctgtctttcagatctaaaaaaaaaaaaaaaaaaaaaaaaaaaaaaaaaaaaaaaaaaaaaaaaaaaaaaaaaaaaaaaaaaaaaaaaaaaaaaaaaaaaaaaaaaaaaaaaaaaa

SEQ ID NO: 5468 - RNA, 1562 nt, synthetic construct
  misc_feature 1..1562: note = mRNA a-1 (A100) (opt28) from Homo sapiens__NP_000448.3__HNF4A(39-474)(S142A_S143A)
  source 1..1562: mol_type = other RNA
aggagagtcccgcagtcggcgtccagcggctctgcttgttcgtgtgtgtgtcgttgcaggccttattcaagcttaccatggacacatctccctcagagggcactaacctgaatgcccctaacagtctgggggtgagcgctctgtgcgcaatctgcggagacagggccaccggcaaacactacggggcttcctcttgtgatggatgcaagggctttttcagacgcagcgtccggaaaaatcatatgtactcatgccgatttagtaggcagtgcgtggtggacaaggacaagagaaaccagtgccgctattgtcggctgaaaaagtgcttcagggcaggaatgaaaaaggaagccgtccagaatgagagagatcgaatttccacacggcgcgctgcatacgaagacagctctctgccaagcatcaacgccctgctgcaggcagaggtgctgtccaggcagatcacttcacccgtgagtgggattaacggcgatatcagagctaagaaaattgccagcatcgcagacgtctgcgaatctatgaaggagcagctgctggtgctggtggagtgggctaaatacatccctgccttttgcgaactgccactggacgatcaggtcgcactgctgcgggctcacgccggagagcatctgctgctgggcgcaaccaagcgatccatggtgttcaaggacgtgctgctgctggggaatgactatattgtccccaggcactgccctgaactggctgagatgagcagagtgtcaatccgcatcctggatgaactggtgctgccattccaggagctgcagattgacgataacgaatacgcctacctgaaagcaatcatctttttcgaccccgacgccaagggactgagtgatcctggcaaaattaagcggctgaggtctcaggtccaggtgtccctggaggactatatcaatgacagacagtacgatagccgagggcggtttggagaactgctgctgctgctgccaacactgcagagcattacctggcagatgatcgagcagatccagttcattaaactgttcggcatggctaagatcgacaacctgctgcaggagatgctgctgggagggtccccctcagatgcacctcatgcccaccacccactgcatccccacctgatgcaggaacatatgggcactaatgtgatcgtcgcaaacacaatgcctacccacctgtctaatggacagatgtgtgagtggccacgccccaggggccaggctgcaactcctgaaaccccacagcccagtcctccagggggaagcggctccgagccctacaagctgctgcctggagccgtggctacaattgtgaaaccactgtctgcaatcccccagcctaccattactaagcaggaagtcatctgaggactagtccctgttcccagagcccacttttttttctttttttgaaataaaatagcctgtctttcagatctaaaaaaaaaaaaaaaaaaaaaaaaaaaaaaaaaaaaaaaaaaaaaaaaaaaaaaaaaaaaaaaaaaaaaaaaaaaaaaaaaaaaaaaaaaaaaaaaaaaa

SEQ ID NO: 5469 - RNA, 1562 nt, synthetic construct
  misc_feature 1..1562: note = mRNA a-1 (A100) (opt28) from Homo sapiens__NP_000448.3__HNF4A(39-474)(S142E_S143E)
  source 1..1562: mol_type = other RNA
aggagagtcccgcagtcggcgtccagcggctctgcttgttcgtgtgtgtgtcgttgcaggccttattcaagcttaccatggacacatctccctcagagggcactaacctgaatgcccctaacagtctgggggtgagcgctctgtgcgcaatctgcggagacagggccaccggcaaacactacggggcttcctcttgtgatggatgcaagggctttttcagacgcagcgtccggaaaaatcatatgtactcatgccgatttagtaggcagtgcgtggtggacaaggacaagagaaaccagtgccgctattgtcggctgaaaaagtgcttcagggcaggaatgaaaaaggaagccgtccagaatgagagagatcgaatttccacacggcgcgaagagtacgaagacagctctctgccaagcatcaacgctctgctgcaggcagaggtgctgtccaggcagatcacttcacccgtgagtgggattaacggcgatatcagagccaagaaaattgcaagcatcgctgacgtctgcgagtctatgaaggaacagctgctggtgctggtggagtgggccaaatacatccctgcattttgcgaactgccactggacgatcaggtcgctctgctgcgggcccacgcaggagagcatctgctgctgggcgctaccaagcgatccatggtgttcaaggacgtgctgctgctggggaatgactatattgtccccaggcactgccctgaactggccgagatgagcagagtgtcaatccgcatcctggatgaactggtgctgccattccaggagctgcagattgacgataacgaatacgcatacctgaaagctatcatctttttcgaccccgacgccaagggactgagtgatcctggcaaaattaagcggctgaggtctcaggtccaggtgtccctggaggactatatcaatgacagacagtacgatagccgagggcggtttggagagctgctgctgctgctgccaacactgcagagcattacctggcagatgatcgaacagatccagttcattaaactgttcggcatggcaaagatcgacaacctgctgcaggagatgctgctgggagggtccccctcagatgcccctcatgctcaccacccactgcatccccacctgatgcaggaacatatgggcactaatgtgatcgtcgcaaacacaatgcctacccacctgtctaatggacagatgtgtgagtggccacgccccaggggccaggccgcaactcctgaaaccccacagcccagtcctccagggggaagcggctccgagccctacaagctgctgcctggagctgtggcaacaattgtgaaaccactgtctgccatcccccagcctaccattactaagcaggaagtcatctgaggactagtccctgttcccagagcccacttttttttctttttttgaaataaaatagcctgtctttcagatctaaaaaaaaaaaaaaaaaaaaaaaaaaaaaaaaaaaaaaaaaaaaaaaaaaaaaaaaaaaaaaaaaaaaaaaaaaaaaaaaaaaaaaaaaaaaaaaaaaaa

SEQ ID NO: 5470 - RNA, 1562 nt, synthetic construct
  misc_feature 1..1562: note = mRNA a-1 (A100) (opt28) from Homo sapiens__NP_000448.3__HNF4A(39-474)(S143A)
  source 1..1562: mol_type = other RNA
aggagagtcccgcagtcggcgtccagcggctctgcttgttcgtgtgtgtgtcgttgcaggccttattcaagcttaccatggacacatctccctcagagggcactaacctgaatgcccctaacagtctgggggtgagcgctctgtgcgcaatctgcggagacagggccaccggcaaacactacggggcttcctcttgtgatggatgcaagggctttttcagacgcagcgtccggaaaaatcatatgtactcatgccgatttagtaggcagtgcgtggtggacaaggacaagagaaaccagtgccgctattgtcggctgaaaaagtgcttcagggcaggaatgaaaaaggaagccgtccagaatgagagagatcgaatttccacacggcgcagcgcttacgaagactctagcctgccatccatcaacgcactgctgcaggccgaggtgctgtcaaggcagatcaccagtcccgtgagcgggattaacggcgatatcagagcaaagaaaattgcttctatcgccgacgtctgcgaatccatgaaggagcagctgctggtgctggtggagtgggcaaaatacatccctgctttttgcgaactgccactggacgatcaggtcgccctgctgcgggcacacgctggagagcatctgctgctgggcgccactaagcgaagcatggtgttcaaggacgtgctgctgctggggaatgactatattgtccccaggcactgccctgaactggcagagatgtcaagagtgagtatccgcatcctggatgaactggtgctgccattccaggagctgcagattgacgataacgaatacgcttacctgaaagccatcatctttttcgaccccgacgcaaagggactgtctgatcctggcaaaattaagcggctgaggtcccaggtccaggtgagcctggaggactatatcaatgacagacagtacgatagccgagggcggtttggagaactgctgctgctgctgccaacactgcagtccattacctggcagatgatcgagcagatccagttcattaaactgttcggcatggccaagatcgacaacctgctgcaggagatgctgctgggagggtcaccctctgatgctcctcatgcacaccacccactgcatccccacctgatgcaggaacatatgggcactaatgtgatcgtcgccaacacaatgcctacccacctgagtaatggacagatgtgtgagtggccacgccccaggggccaggcagctactcctgaaaccccacagcccagccctccagggggatccggctctgagccctacaagctgctgcctggagcagtggccacaattgtgaaaccactgagcgctatcccccagcctaccattactaagcaggaagtcatctgaggactagtccctgttcccagagcccacttttttttctttttttgaaataaaatagcctgtctttcagatctaaaaaaaaaaaaaaaaaaaaaaaaaaaaaaaaaaaaaaaaaaaaaaaaaaaaaaaaaaaaaaaaaaaaaaaaaaaaaaaaaaaaaaaaaaaaaaaaaaaa

SEQ ID NO: 5471 - RNA, 1562 nt, synthetic construct
  misc_feature 1..1562: note = mRNA a-1 (A100) (opt28) from Homo sapiens__NP_000448.3__HNF4A(39-474)(T166A)
  source 1..1562: mol_type = other RNA
aggagagtcccgcagtcggcgtccagcggctctgcttgttcgtgtgtgtgtcgttgcaggccttattcaagcttaccatggacacatctccctcagagggcactaacctgaatgcccctaacagtctgggggtgagcgctctgtgcgcaatctgcggagacagggccaccggcaaacactacggggcttcctcttgtgatggatgcaagggctttttcagacgcagcgtccggaaaaatcatatgtactcatgccgatttagtaggcagtgcgtggtggacaaggacaagagaaaccagtgccgctattgtcggctgaaaaagtgcttcagggcaggaatgaaaaaggaagccgtccagaatgagagagatcgaatttccacacggcgcagctcttacgaagacagctccctgccatcaatcaacgctctgctgcaggcagaggtgctgagtaggcagatcgccagccccgtgtctgggattaacggcgatatcagagcaaagaaaattgcttccatcgccgacgtctgcgaaagcatgaaggagcagctgctggtgctggtggagtgggcaaaatacatccctgctttttgcgaactgccactggacgatcaggtcgccctgctgcgggcacacgctggagagcatctgctgctgggcgccactaagcgatcaatggtgttcaaggacgtgctgctgctggggaatgactatattgtccccaggcactgccctgaactggcagagatgagtagagtgtctatccgcatcctggatgaactggtgctgccattccaggagctgcagattgacgataacgaatacgcttacctgaaagccatcatctttttcgaccccgacgcaaagggactgtccgatcctggcaaaattaagcggctgaggagccaggtccaggtgagcctggaggactatatcaatgacagacagtacgattcccgagggcggtttggagaactgctgctgctgctgccaaccctgcagtcaattacatggcagatgatcgagcagatccagttcattaaactgttcggcatggccaagatcgacaacctgctgcaggagatgctgctgggagggtctcccagtgatgctcctcatgcacaccacccactgcatccccacctgatgcaggaacatatgggcaccaatgtgatcgtcgccaacactatgcctacacacctgagcaatggacagatgtgtgagtggccacgccccaggggccaggcagctacccctgaaactccacagccctcccctccagggggatctggcagcgagccctacaagctgctgcctggagcagtggccaccattgtgaaaccactgtcagctatcccccagcctacaattaccaagcaggaagtcatctgaggactagtccctgttcccagagcccacttttttttctttttttgaaataaaatagcctgtctttcagatctaaaaaaaaaaaaaaaaaaaaaaaaaaaaaaaaaaaaaaaaaaaaaaaaaaaaaaaaaaaaaaaaaaaaaaaaaaaaaaaaaaaaaaaaaaaaaaaaaaaa

SEQ ID NO: 5472 - RNA, 1562 nt, synthetic construct
  misc_feature 1..1562: note = mRNA a-1 (A100) (opt28) from Homo sapiens__NP_000448.3__HNF4A(39-474)(S167E)
  source 1..1562: mol_type = other RNA
aggagagtcccgcagtcggcgtccagcggctctgcttgttcgtgtgtgtgtcgttgcaggccttattcaagcttaccatggacacatctccctcagagggcactaacctgaatgcccctaacagtctgggggtgagcgctctgtgcgcaatctgcggagacagggccaccggcaaacactacggggcttcctcttgtgatggatgcaagggctttttcagacgcagcgtccggaaaaatcatatgtactcatgccgatttagtaggcagtgcgtggtggacaaggacaagagaaaccagtgccgctattgtcggctgaaaaagtgcttcagggcaggaatgaaaaaggaagccgtccagaatgagagagatcgaatttccacacggcgcagctcttacgaagacagctccctgccatcaatcaacgctctgctgcaggcagaggtgctgagtaggcagatcactgaacccgtgagcgggattaacggcgatatcagagccaagaaaattgcatctatcgctgacgtctgcgagtccatgaaggagcagctgctggtgctggtggaatgggccaaatacatccctgcattttgcgagctgccactggacgatcaggtcgctctgctgcgggcccacgcaggagaacatctgctgctgggcgctaccaagcgaagcatggtgttcaaggacgtgctgctgctggggaatgactatattgtccccaggcactgccctgagctggccgaaatgtcaagagtgagtatccgcatcctggatgagctggtgctgccattccaggaactgcagattgacgataacgagtacgcatacctgaaagctatcatctttttcgaccccgacgccaagggactgtctgatcctggcaaaattaagcggctgaggtcccaggtccaggtgagcctggaagactatatcaatgacagacagtacgatagccgagggcggtttggagagctgctgctgctgctgccaacactgcagtccattacctggcagatgatcgagcagatccagttcattaaactgttcggcatggcaaagatcgacaacctgctgcaggaaatgctgctgggagggtcaccctctgatgcccctcatgctcaccacccactgcatccccacctgatgcaggagcatatgggcactaatgtgatcgtcgcaaacacaatgcctacccacctgagtaatggacagatgtgtgaatggccacgccccaggggccaggccgcaactcctgagaccccacagcccagccctccagggggatccggctctgaaccctacaagctgctgcctggagctgtggcaacaattgtgaaaccactgagcgccatcccccagcctaccattactaagcaggaggtcatctgaggactagtccctgttcccagagcccacttttttttctttttttgaaataaaatagcctgtctttcagatctaaaaaaaaaaaaaaaaaaaaaaaaaaaaaaaaaaaaaaaaaaaaaaaaaaaaaaaaaaaaaaaaaaaaaaaaaaaaaaaaaaaaaaaaaaaaaaaaaaaa

SEQ ID NO: 5473 - RNA, 1562 nt, synthetic construct
  misc_feature 1..1562: note = mRNA a-1 (A100) (opt28) from Homo sapiens__NP_000448.3__HNF4A(39-474)(S167A)
  source 1..1562: mol_type = other RNA
aggagagtcccgcagtcggcgtccagcggctctgcttgttcgtgtgtgtgtcgttgcaggccttattcaagcttaccatggacacatctccctcagagggcactaacctgaatgcccctaacagtctgggggtgagcgctctgtgcgcaatctgcggagacagggccaccggcaaacactacggggcttcctcttgtgatggatgcaagggctttttcagacgcagcgtccggaaaaatcatatgtactcatgccgatttagtaggcagtgcgtggtggacaaggacaagagaaaccagtgccgctattgtcggctgaaaaagtgcttcagggcaggaatgaaaaaggaagccgtccagaatgagagagatcgaatttccacacggcgcagctcttacgaagacagctccctgccatcaatcaacgctctgctgcaggcagaggtgctgagtaggcagatcactgcccccgtgagcgggattaacggcgatatcagagcaaagaaaattgcttctatcgccgacgtctgcgaatccatgaaggagcagctgctggtgctggtggagtgggcaaaatacatccctgctttttgcgaactgccactggacgatcaggtcgccctgctgcgggcacacgctggagagcatctgctgctgggcgccaccaagcgaagcatggtgttcaaggacgtgctgctgctggggaatgactatattgtccccaggcactgccctgaactggcagagatgtcaagagtgagtatccgcatcctggatgaactggtgctgccattccaggagctgcagattgacgataacgaatacgcttacctgaaagccatcatctttttcgaccccgacgcaaagggactgtctgatcctggcaaaattaagcggctgaggtcccaggtccaggtgagcctggaggactatatcaatgacagacagtacgatagccgagggcggtttggagaactgctgctgctgctgccaacactgcagtccattacctggcagatgatcgagcagatccagttcattaaactgttcggcatggccaagatcgacaacctgctgcaggagatgctgctgggagggtcaccctctgatgctcctcatgcacaccacccactgcatccccacctgatgcaggaacatatgggcactaatgtgatcgtcgccaacacaatgcctacccacctgagtaatggacagatgtgtgagtggccacgccccaggggccaggcagctactcctgaaaccccacagcccagccctccagggggatccggctctgagccctacaagctgctgcctggagcagtggccacaattgtgaaaccactgagcgctatcccccagcctaccattactaagcaggaagtcatctgaggactagtccctgttcccagagcccacttttttttctttttttgaaataaaatagcctgtctttcagatctaaaaaaaaaaaaaaaaaaaaaaaaaaaaaaaaaaaaaaaaaaaaaaaaaaaaaaaaaaaaaaaaaaaaaaaaaaaaaaaaaaaaaaaaaaaaaaaaaaaa

SEQ ID NO: 5474 - RNA, 1562 nt, synthetic construct
  misc_feature 1..1562: note = mRNA a-1 (A100) (opt28) from Homo sapiens__NP_000448.3__HNF4A(39-474)(S167A_S378A_T429A_T432A _S436A)
  source 1..1562: mol_type = other RNA
aggagagtcccgcagtcggcgtccagcggctctgcttgttcgtgtgtgtgtcgttgcaggccttattcaagcttaccatggacacatctccctcagagggcactaacctgaatgcccctaacagtctgggggtgagcgctctgtgcgcaatctgcggagacagggccaccggcaaacactacggggcttcctcttgtgatggatgcaagggctttttcagacgcagcgtccggaaaaatcatatgtactcatgccgatttagtaggcagtgcgtggtggacaaggacaagagaaaccagtgccgctattgtcggctgaaaaagtgcttcagggcaggaatgaaaaaggaagccgtccagaatgagagagatcgaatttccacacggcgcagctcttacgaagacagctccctgccatcaatcaacgctctgctgcaggcagaggtgctgagtaggcagatcactgcccccgtgagcgggattaacggcgatatcagagcaaagaaaattgcttctatcgccgacgtctgcgaatccatgaaggagcagctgctggtgctggtggagtgggcaaaatacatccctgctttttgcgaactgccactggacgatcaggtcgccctgctgcgggcacacgctggagagcatctgctgctgggcgccaccaagcgaagcatggtgttcaaggacgtgctgctgctggggaatgactatattgtccccaggcactgccctgaactggcagagatgtcaagagtgagtatccgcatcctggatgaactggtgctgccattccaggagctgcagattgacgataacgaatacgcttacctgaaagccatcatctttttcgaccccgacgcaaagggactgtctgatcctggcaaaattaagcggctgaggtcccaggtccaggtgagcctggaggactatatcaatgacagacagtacgatagccgagggcggtttggagaactgctgctgctgctgccaacactgcagtccattacctggcagatgatcgagcagatccagttcattaaactgttcggcatggccaagatcgacaacctgctgcaggagatgctgctgggaggggctccctcagatgcacctcatgcccaccacccactgcatccccacctgatgcaggaacatatgggcactaatgtgatcgtcgcaaacacaatgcctacccacctgtctaatggacagatgtgtgagtggccacgccccaggggccaggctgcagcccctgaagctccacagcccgcacctccagggggaagtggcagcgagccctacaagctgctgcctggagccgtggctactattgtgaaaccactgtccgcaatcccccagcctaccattacaaagcaggaagtcatctgaggactagtccctgttcccagagcccacttttttttctttttttgaaataaaatagcctgtctttcagatctaaaaaaaaaaaaaaaaaaaaaaaaaaaaaaaaaaaaaaaaaaaaaaaaaaaaaaaaaaaaaaaaaaaaaaaaaaaaaaaaaaaaaaaaaaaaaaaaaaaa

SEQ ID NO: 5475 - RNA, 1562 nt, synthetic construct
  misc_feature 1..1562: note = mRNA a-1 (A100) (opt28) from Homo sapiens__NP_000448.3__HNF4A(39-474)(S167E_S378E_T429E_T432E _S436E)
  source 1..1562: mol_type = other RNA
aggagagtcccgcagtcggcgtccagcggctctgcttgttcgtgtgtgtgtcgttgcaggccttattcaagcttaccatggacacatctccctcagagggcactaacctgaatgcccctaacagtctgggggtgagcgctctgtgcgcaatctgcggagacagggccaccggcaaacactacggggcttcctcttgtgatggatgcaagggctttttcagacgcagcgtccggaaaaatcatatgtactcatgccgatttagtaggcagtgcgtggtggacaaggacaagagaaaccagtgccgctattgtcggctgaaaaagtgcttcagggcaggaatgaaaaaggaagccgtccagaatgagagagatcgaatttccacacggcgcagctcttacgaagacagctccctgccatcaatcaacgctctgctgcaggcagaggtgctgagtaggcagatcactgaacccgtgagcgggattaacggcgatatcagagccaagaaaattgcatctatcgctgacgtctgcgagtccatgaaggagcagctgctggtgctggtggaatgggccaaatacatccctgcattttgcgagctgccactggacgatcaggtcgctctgctgcgggcccacgcaggagaacatctgctgctgggcgctaccaagcgaagcatggtgttcaaggacgtgctgctgctggggaatgactatattgtccccaggcactgccctgagctggccgaaatgtcaagagtgagtatccgcatcctggatgagctggtgctgccattccaggaactgcagattgacgataacgagtacgcatacctgaaagctatcatctttttcgaccccgacgccaagggactgtctgatcctggcaaaattaagcggctgaggtcccaggtccaggtgagcctggaagactatatcaatgacagacagtacgatagccgagggcggtttggagagctgctgctgctgctgccaacactgcagtccattacctggcagatgatcgagcagatccagttcattaaactgttcggcatggcaaagatcgacaacctgctgcaggaaatgctgctgggaggggagccctcagatgcccctcatgctcaccacccactgcatccccacctgatgcaggaacatatgggcactaatgtgatcgtcgcaaacacaatgcctacccacctgtctaatggacagatgtgtgagtggccacgccccaggggccaggccgcagaacctgaggaaccacagcccgagcctccagggggaagtggcagcgagccctacaagctgctgcctggagctgtggcaactattgtgaaaccactgtccgccatcccccagcctaccattacaaagcaggaagtcatctgaggactagtccctgttcccagagcccacttttttttctttttttgaaataaaatagcctgtctttcagatctaaaaaaaaaaaaaaaaaaaaaaaaaaaaaaaaaaaaaaaaaaaaaaaaaaaaaaaaaaaaaaaaaaaaaaaaaaaaaaaaaaaaaaaaaaaaaaaaaaaa

SEQ ID NO: 5476 - RNA, 1562 nt, synthetic construct
  misc_feature 1..1562: note = mRNA a-1 (A100) (opt28) from Homo sapiens__NP_000448.3__HNF4A(39-474)(S87A)
  source 1..1562: mol_type = other RNA
aggagagtcccgcagtcggcgtccagcggctctgcttgttcgtgtgtgtgtcgttgcaggccttattcaagcttaccatggacacatctccctcagagggcactaacctgaatgcccctaacagtctgggggtgagcgctctgtgcgcaatctgcggagacagggccaccggcaaacactacggggcttcctcttgtgatggatgcaagggctttttcagacgcgcagtccggaaaaatcatatgtacagctgccgattttcaaggcagtgcgtggtggacaaggacaagagaaaccagtgccgctattgtcggctgaaaaagtgcttcagggccggaatgaaaaaggaagctgtccagaatgagagagatcgaattagtacacggcgctccagctacgaagactctagcctgccatccatcaacgcactgctgcaggccgaggtgctgtcaaggcagatcaccagtcccgtgagcgggattaacggcgatatcagagcaaagaaaattgcttctatcgccgacgtctgcgaatccatgaaggagcagctgctggtgctggtggagtgggcaaaatacatccctgctttttgcgaactgccactggacgatcaggtcgccctgctgcgggcacacgctggagagcatctgctgctgggcgccactaagcgaagcatggtgttcaaggacgtgctgctgctggggaatgactatattgtccccaggcactgccctgaactggcagagatgtcaagagtgagtatccgcatcctggatgaactggtgctgccattccaggagctgcagattgacgataacgaatacgcttacctgaaagccatcatctttttcgaccccgacgcaaagggactgtctgatcctggcaaaattaagcggctgaggtcccaggtccaggtgagcctggaggactatatcaatgacagacagtacgatagccgagggcggtttggagaactgctgctgctgctgccaacactgcagtccattacctggcagatgatcgagcagatccagttcattaaactgttcggcatggccaagatcgacaacctgctgcaggagatgctgctgggagggtcaccctctgatgctcctcatgcacaccacccactgcatccccacctgatgcaggaacatatgggcactaatgtgatcgtcgccaacacaatgcctacccacctgagtaatggacagatgtgtgagtggccacgccccaggggccaggcagctactcctgaaaccccacagcccagccctccagggggatccggctctgagccctacaagctgctgcctggagcagtggccacaattgtgaaaccactgagcgctatcccccagcctaccattactaagcaggaagtcatctgaggactagtccctgttcccagagcccacttttttttctttttttgaaataaaatagcctgtctttcagatctaaaaaaaaaaaaaaaaaaaaaaaaaaaaaaaaaaaaaaaaaaaaaaaaaaaaaaaaaaaaaaaaaaaaaaaaaaaaaaaaaaaaaaaaaaaaaaaaaaaa

SEQ ID NO: 5477 - RNA, 1562 nt, synthetic construct
  misc_feature 1..1562: note = mRNA a-1 (A100) (opt28) from Homo sapiens__NP_000448.3__HNF4A(39-474)(S87E)
  source 1..1562: mol_type = other RNA
aggagagtcccgcagtcggcgtccagcggctctgcttgttcgtgtgtgtgtcgttgcaggccttattcaagcttaccatggacacatctccctcagagggcactaacctgaatgcccctaacagtctgggggtgagcgctctgtgcgcaatctgcggagacagggccaccggcaaacactacggggcttcctcttgtgatggatgcaagggctttttcagacgcgaagtccggaaaaatcatatgtacagctgccgattttcaaggcagtgcgtggtggacaaggacaagagaaaccagtgccgctattgtcggctgaaaaagtgcttcagggcaggaatgaaaaaggaggccgtccagaatgaaagagatcgaattagtacacggcgctccagctacgaggactctagcctgccatccatcaacgctctgctgcaggcagaagtgctgtcaaggcagatcaccagtcccgtgagcgggattaacggcgatatcagagccaagaaaattgcatctatcgctgacgtctgcgagtccatgaaggagcagctgctggtgctggtggaatgggccaaatacatccctgcattttgcgagctgccactggacgatcaggtcgctctgctgcgggcccacgcaggagaacatctgctgctgggcgctactaagcgaagcatggtgttcaaggacgtgctgctgctggggaatgactatattgtccccaggcactgccctgagctggccgaaatgtcaagagtgagtatccgcatcctggatgagctggtgctgccattccaggaactgcagattgacgataacgagtacgcatacctgaaagctatcatctttttcgaccccgacgccaagggactgtctgatcctggcaaaattaagcggctgaggtcccaggtccaggtgagcctggaagactatatcaatgacagacagtacgatagccgagggcggtttggagagctgctgctgctgctgccaacactgcagtccattacctggcagatgatcgagcagatccagttcattaaactgttcggcatggcaaagatcgacaacctgctgcaggaaatgctgctgggagggtcaccctctgatgcccctcatgctcaccacccactgcatccccacctgatgcaggagcatatgggcactaatgtgatcgtcgcaaacacaatgcctacccacctgagtaatggacagatgtgtgaatggccacgccccaggggccaggccgcaactcctgagaccccacagcccagccctccagggggatccggctctgaaccctacaagctgctgcctggagctgtggcaacaattgtgaaaccactgagcgccatcccccagcctaccattactaagcaggaggtcatctgaggactagtccctgttcccagagcccacttttttttctttttttgaaataaaatagcctgtctttcagatctaaaaaaaaaaaaaaaaaaaaaaaaaaaaaaaaaaaaaaaaaaaaaaaaaaaaaaaaaaaaaaaaaaaaaaaaaaaaaaaaaaaaaaaaaaaaaaaaaaaa

SEQ ID NO: 5478 - RNA, 1562 nt, synthetic construct
  misc_feature 1..1562: note = mRNA a-1 (A100) (opt28) from Homo sapiens__NP_000448.3__HNF4A(39-474)(R2V)
  source 1..1562: mol_type = other RNA
aggagagtcccgcagtcggcgtccagcggctctgcttgttcgtgtgtgtgtcgttgcaggccttattcaagcttaccatggacacatctccctcagagggcactaacctgaatgcccctaacagtctgggggtgagcgctctgtgcgcaatctgcggagaccgggccaccggcaaacactacggggcttcctcttgtgatggatgcaagggctttttcaggagaagcgtgcgcaaaaatcatatgtactcatgccgatttagtcggcagtgcgtggtcgacaaggacaagaggaaccagtgcagatattgtcgcctgaaaaagtgcttccgggcaggaatgaaaaaggaagccgtgcagaatgagagggatagaatttccacacgacggagctcttacgaagacagctccctgccatcaatcaacgctctgctgcaggcagaggtgctgagtcgccagatcactagccccgtctctgggattaacggcgatatcagggccaagaaaattgcatccatcgctgacgtgtgcgaaagcatgaaggagcagctgctggtgctggtcgagtgggccaaatacatccctgcattttgcgaactgccactggacgatcaggtggctctgctgagagcccacgcaggagagcatctgctgctgggcgctaccaagcggtcaatggtgttcaaggacgtcctgctgctggggaatgactatattgtgccccgacactgccctgaactggccgagatgagtagggtgtctatcagaatcctggatgaactggtcctgccattccaggagctgcagattgacgataacgaatacgcatacctgaaagctatcatctttttcgaccccgacgccaagggactgtccgatcctggcaaaattaagcgcctgcggagccaggtccaggtgagcctggaggactatatcaatgacaggcagtacgattccagagggcgatttggagaactgctgctgctgctgccaacactgcagtcaattacctggcagatgatcgagcagatccagttcattaaactgttcggcatggcaaagatcgacaacctgctgcaggagatgctgctgggagggtctcccagtgatgcccctcatgctcaccacccactgcatccccacctgatgcaggaacatatgggcactaatgtgatcgtggcaaacacaatgcctacccacctgagcaatggacagatgtgtgagtggccacggccccgcggccaggccgcaactcctgaaaccccacagccctcccctccagggggatctggcagcgagccctacaagctgctgcctggagctgtggcaacaattgtcaaaccactgtcagccatcccccagcctaccattactaagcaggaagtgatctgaggactagtccctgttcccagagcccacttttttttctttttttgaaataaaatagcctgtctttcagatctaaaaaaaaaaaaaaaaaaaaaaaaaaaaaaaaaaaaaaaaaaaaaaaaaaaaaaaaaaaaaaaaaaaaaaaaaaaaaaaaaaaaaaaaaaaaaaaaaaaa

SEQ ID NO: 5479 - RNA, 1562 nt, synthetic construct
  misc_feature 1..1562: note = mRNA a-1 (A100) (opt28) from Homo sapiens__NP_000448.3__HNF4A(39-474)(R2V_K5V)
  source 1..1562: mol_type = other RNA
aggagagtcccgcagtcggcgtccagcggctctgcttgttcgtgtgtgtgtcgttgcaggccttattcaagcttaccatggacacatctccctcagagggcactaacctgaatgcccctaacagtctgggggtgagcgctctgtgcgcaatctgcggagaccgggccaccggcaagcactacggggcttcctcttgtgatggatgcaaaggctttttcaggagaagcgtgcgcaagaatcatatgtactcatgccgatttagtcggcagtgcgtcgtggacaaagacaagaggaaccagtgcagatattgtcgcctgaagaaatgcttccgggcaggaatgaagaaagaagccgtgcagaatgagagggatagaatttccacacgacggagctcttacgaagacagctccctgccatcaatcaacgctctgctgcaggcagaggtcctgagtcgccagatcactagccccgtgtctgggattaacggcgatatcagggccaagaagattgcatccatcgctgacgtgtgcgaaagcatgaaagagcagctgctggtcctggtggagtgggccaagtacatccctgcattttgcgaactgccactggacgatcaggtggctctgctgagagcccacgcaggagagcatctgctgctgggcgctaccaaacggtcaatggtcttcaaggacgtgctgctgctggggaatgactatattgtgccccgacactgccctgaactggccgagatgagtagggtctctatcagaatcctggatgaactggtgctgccattccaggagctgcagattgacgataacgaatacgcatacctgaaggctatcatctttttcgaccccgacgccaaaggactgtccgatcctggcaagattaaacgcctgcggagccaggtgcaggtcagcctggaggactatatcaatgacaggcagtacgattccagagggcgatttggagaactgctgctgctgctgccaacactgcagtcaattacctggcagatgatcgagcagatccagttcattaagctgttcggcatggcaaaaatcgacaacctgctgcaggagatgctgctgggagggtctcccagtgatgcccctcatgctcaccacccactgcatccccacctgatgcaggaacatatgggcactaatgtgatcgtggcaaacacaatgcctacccacctgagcaatggacagatgtgtgagtggccacggccccgcggccaggccgcaactcctgaaaccccacagccctcccctccagggggatctggcagcgagccctacaagctgctgcctggagctgtcgcaacaattgtgaagccactgtcagccatcccccagcctaccattactaaacaggaagtcatctgaggactagtccctgttcccagagcccacttttttttctttttttgaaataaaatagcctgtctttcagatctaaaaaaaaaaaaaaaaaaaaaaaaaaaaaaaaaaaaaaaaaaaaaaaaaaaaaaaaaaaaaaaaaaaaaaaaaaaaaaaaaaaaaaaaaaaaaaaaaaaa

SEQ ID NO: 5480 - RNA, 1562 nt, synthetic construct
  misc_feature 1..1562: note = mRNA a-1 (A100) (opt28) from Homo sapiens__NP_000448.3__HNF4A(39-474)(K179R_K180R)
  source 1..1562: mol_type = other RNA
aggagagtcccgcagtcggcgtccagcggctctgcttgttcgtgtgtgtgtcgttgcaggccttattcaagcttaccatggacacatctccctcagagggcactaacctgaatgcccctaacagtctgggggtgagcgctctgtgcgcaatctgcggagacagggccaccggcaaacactacggggcttcctcttgtgatggatgcaagggctttttcagacgcagcgtccggaaaaatcatatgtactcatgccgatttagtaggcagtgcgtggtggacaaggacaagagaaaccagtgccgctattgtcggctgaaaaagtgcttcagggcaggaatgaaaaaggaagccgtccagaatgagagagatcgaatttccacacggcgcagctcttacgaagacagctccctgccatcaatcaacgctctgctgcaggcagaggtgctgagtaggcagatcactagccccgtgtctgggattaacggcgatatcagagcccggcgaattgcatccatcgctgacgtctgcgaaagcatgaaggagcagctgctggtgctggtggagtgggccaaatacatccctgcattttgcgaactgccactggacgatcaggtcgctctgctgagggcccacgcaggagagcatctgctgctgggcgctaccaagagatcaatggtgttcaaagacgtgctgctgctggggaatgactatattgtcccccgccactgccctgaactggccgagatgagtcgggtgtctatcaggatcctggatgaactggtgctgccattccaggagctgcagattgacgataacgaatacgcatacctgaaggctatcatctttttcgaccccgacgccaagggactgtccgatcctggcaaaattaagagactgcgaagccaggtccaggtgagcctggaggactatatcaatgaccggcagtacgattcccgcgggaggtttggagaactgctgctgctgctgccaacactgcagtcaattacctggcagatgatcgagcagatccagttcattaaactgttcggcatggcaaagatcgacaacctgctgcaggagatgctgctgggagggtctcccagtgatgcccctcatgctcaccacccactgcatccccacctgatgcaggaacatatgggcactaatgtgatcgtcgcaaacacaatgcctacccacctgagcaatggacagatgtgtgagtggccaagaccccggggccaggccgcaactcctgaaaccccacagccctcccctccagggggatctggcagcgagccctacaaactgctgcctggagctgtggcaacaattgtgaagccactgtcagccatcccccagcctaccattactaagcaggaagtcatctgaggactagtccctgttcccagagcccacttttttttctttttttgaaataaaatagcctgtctttcagatctaaaaaaaaaaaaaaaaaaaaaaaaaaaaaaaaaaaaaaaaaaaaaaaaaaaaaaaaaaaaaaaaaaaaaaaaaaaaaaaaaaaaaaaaaaaaaaaaaaaa

SEQ ID NO: 5481 - RNA, 1562 nt, synthetic construct
  misc_feature 1..1562: note = mRNA a-1 (A100) (opt28) from Homo sapiens__NP_000448.3__HNF4A(39-474)(K234R)
  source 1..1562: mol_type = other RNA
aggagagtcccgcagtcggcgtccagcggctctgcttgttcgtgtgtgtgtcgttgcaggccttattcaagcttaccatggacacatctccctcagagggcactaacctgaatgcccctaacagtctgggggtgagcgctctgtgcgcaatctgcggagacagggccaccggcaaacactacggggcttcctcttgtgatggatgcaagggctttttcagacgcagcgtccggaaaaatcatatgtactcatgccgatttagtaggcagtgcgtggtggacaaggacaagagaaaccagtgccgctattgtcggctgaaaaagtgcttcagggcaggaatgaaaaaggaagccgtccagaatgagagagatcgaatttccacacggcgcagctcttacgaagacagctccctgccatcaatcaacgctctgctgcaggcagaggtgctgagtaggcagatcactagccccgtgtctgggattaacggcgatatcagagccaagaaaattgcatccatcgctgacgtctgcgaaagcatgaaggagcagctgctggtgctggtggagtgggccaaatacatccctgcattttgcgaactgccactggacgatcaggtcgctctgctgcgggcccacgcaggagagcatctgctgctgggcgctacccgaaggtcaatggtgttcaaggacgtgctgctgctggggaatgactatattgtccccagacactgccctgaactggccgagatgagtcgcgtgtctatccggatcctggatgaactggtgctgccattccaggagctgcagattgacgataacgaatacgcatacctgaaggctatcatctttttcgaccccgacgccaaaggactgtccgatcctggcaagattaaaaggctgagaagccaggtccaggtgagcctggaggactatatcaatgaccgacagtacgattcccgggggcgctttggagaactgctgctgctgctgccaacactgcagtcaattacctggcagatgatcgagcagatccagttcattaagctgttcggcatggcaaaaatcgacaacctgctgcaggagatgctgctgggagggtctcccagtgatgcccctcatgctcaccacccactgcatccccacctgatgcaggaacatatgggcactaatgtgatcgtcgcaaacacaatgcctacccacctgagcaatggacagatgtgtgagtggccaaggcccagaggccaggccgcaactcctgaaaccccacagccctcccctccagggggatctggcagcgagccctacaagctgctgcctggagctgtggcaacaattgtgaagccactgtcagccatcccccagcctaccattactaaacaggaagtcatctgaggactagtccctgttcccagagcccacttttttttctttttttgaaataaaatagcctgtctttcagatctaaaaaaaaaaaaaaaaaaaaaaaaaaaaaaaaaaaaaaaaaaaaaaaaaaaaaaaaaaaaaaaaaaaaaaaaaaaaaaaaaaaaaaaaaaaaaaaaaaaa

SEQ ID NO: 5482 - RNA, 1562 nt, synthetic construct
  misc_feature 1..1562: note = mRNA a-1 (A100) (opt28) from Homo sapiens__NP_000448.3__HNF4A(39-474)(K300R)
  source 1..1562: mol_type = other RNA
aggagagtcccgcagtcggcgtccagcggctctgcttgttcgtgtgtgtgtcgttgcaggccttattcaagcttaccatggacacatctccctcagagggcactaacctgaatgcccctaacagtctgggggtgagcgctctgtgcgcaatctgcggagacagggccaccggcaaacactacggggcttcctcttgtgatggatgcaagggctttttcagacgcagcgtccggaaaaatcatatgtactcatgccgatttagtaggcagtgcgtggtggacaaggacaagagaaaccagtgccgctattgtcggctgaaaaagtgcttcagggcaggaatgaaaaaggaagccgtccagaatgagagagatcgaatttccacacggcgcagctcttacgaagacagctccctgccatcaatcaacgctctgctgcaggcagaggtgctgagtaggcagatcactagccccgtgtctgggattaacggcgatatcagagccaagaaaattgcatccatcgctgacgtctgcgaaagcatgaaggagcagctgctggtgctggtggagtgggccaaatacatccctgcattttgcgaactgccactggacgatcaggtcgctctgctgcgggcccacgcaggagagcatctgctgctgggcgctaccaagcgatcaatggtgttcaaggacgtgctgctgctggggaatgactatattgtccccaggcactgccctgaactggccgagatgagtagagtgtctatccgcatcctggatgaactggtgctgccattccaggagctgcagattgacgataacgaatacgcatacctgaaagctatcatctttttcgaccccgacgcccggggactgtccgatcctggcaagattaaaaggctgagaagccaggtccaggtgagcctggaggactatatcaatgaccgacagtacgattcccgggggcgctttggagaactgctgctgctgctgccaacactgcagtcaattacctggcagatgatcgagcagatccagttcattaagctgttcggcatggcaaaaatcgacaacctgctgcaggagatgctgctgggagggtctcccagtgatgcccctcatgctcaccacccactgcatccccacctgatgcaggaacatatgggcactaatgtgatcgtcgcaaacacaatgcctacccacctgagcaatggacagatgtgtgagtggccaaggcccagaggccaggccgcaactcctgaaaccccacagccctcccctccagggggatctggcagcgagccctacaagctgctgcctggagctgtggcaacaattgtgaagccactgtcagccatcccccagcctaccattactaaacaggaagtcatctgaggactagtccctgttcccagagcccacttttttttctttttttgaaataaaatagcctgtctttcagatctaaaaaaaaaaaaaaaaaaaaaaaaaaaaaaaaaaaaaaaaaaaaaaaaaaaaaaaaaaaaaaaaaaaaaaaaaaaaaaaaaaaaaaaaaaaaaaaaaaaa

SEQ ID NO: 5483 - RNA, 1562 nt, synthetic construct
  misc_feature 1..1562: note = mRNA a-1 (A100) (opt28) from Homo sapiens__NP_000448.3__HNF4A(39-474)(K300R_K307R_K309R)
  source 1..1562: mol_type = other RNA
aggagagtcccgcagtcggcgtccagcggctctgcttgttcgtgtgtgtgtcgttgcaggccttattcaagcttaccatggacacatctccctcagagggcactaacctgaatgcccctaacagtctgggggtgagcgctctgtgcgcaatctgcggagacagggccaccggcaaacactacggggcttcctcttgtgatggatgcaagggctttttcagacgcagcgtccggaaaaatcatatgtactcatgccgatttagtaggcagtgcgtggtggacaaggacaagagaaaccagtgccgctattgtcggctgaaaaagtgcttcagggcaggaatgaaaaaggaagccgtccagaatgagagagatcgaatttccacacggcgcagctcttacgaagacagctccctgccatcaatcaacgctctgctgcaggcagaggtgctgagtaggcagatcactagccccgtgtctgggattaacggcgatatcagagccaagaaaattgcatccatcgctgacgtctgcgaaagcatgaaggagcagctgctggtgctggtggagtgggccaaatacatccctgcattttgcgaactgccactggacgatcaggtcgctctgctgcgggcccacgcaggagagcatctgctgctgggcgctaccaagcgatcaatggtgttcaaggacgtgctgctgctggggaatgactatattgtccccaggcactgccctgaactggccgagatgagtagagtgtctatccgcatcctggatgaactggtgctgccattccaggagctgcagattgacgataacgaatacgcatacctgaaagctatcatctttttcgaccccgacgcccggggactgtccgatcctggcaggattagacgactgcggagccaggtccaggtgagcctggaggactatatcaatgaccgccagtacgattccagggggagatttggagaactgctgctgctgctgccaacactgcagtcaattacctggcagatgatcgagcagatccagttcattaagctgttcggcatggcaaaaatcgacaacctgctgcaggagatgctgctgggagggtctcccagtgatgcccctcatgctcaccacccactgcatccccacctgatgcaggaacatatgggcactaatgtgatcgtcgcaaacacaatgcctacccacctgagcaatggacagatgtgtgagtggccacggccccgcggccaggccgcaactcctgaaaccccacagccctcccctccagggggatctggcagcgagccctacaagctgctgcctggagctgtggcaacaattgtgaaaccactgtcagccatcccccagcctaccattactaagcaggaagtcatctgaggactagtccctgttcccagagcccacttttttttctttttttgaaataaaatagcctgtctttcagatctaaaaaaaaaaaaaaaaaaaaaaaaaaaaaaaaaaaaaaaaaaaaaaaaaaaaaaaaaaaaaaaaaaaaaaaaaaaaaaaaaaaaaaaaaaaaaaaaaaaa

SEQ ID NO: 5484 - RNA, 1562 nt, synthetic construct
  misc_feature 1..1562: note = mRNA a-1 (A100) (opt28) from Homo sapiens__NP_000448.3__HNF4A(39-474)(K447R_K470R)
  source 1..1562: mol_type = other RNA
aggagagtcccgcagtcggcgtccagcggctctgcttgttcgtgtgtgtgtcgttgcaggccttattcaagcttaccatggacacatctccctcagagggcactaacctgaatgcccctaacagtctgggggtgagcgctctgtgcgcaatctgcggagacagggccaccggcaaacactacggggcttcctcttgtgatggatgcaagggctttttcagacgcagcgtccggaaaaatcatatgtactcatgccgatttagtaggcagtgcgtggtggacaaggacaagagaaaccagtgccgctattgtcggctgaaaaagtgcttcagggcaggaatgaaaaaggaagccgtccagaatgagagagatcgaatttccacacggcgcagctcttacgaagacagctccctgccatcaatcaacgctctgctgcaggcagaggtgctgagtaggcagatcactagccccgtgtctgggattaacggcgatatcagagccaagaaaattgcatccatcgctgacgtctgcgaaagcatgaaggagcagctgctggtgctggtggagtgggccaaatacatccctgcattttgcgaactgccactggacgatcaggtcgctctgctgcgggcccacgcaggagagcatctgctgctgggcgctaccaagcgatcaatggtgttcaaggacgtgctgctgctggggaatgactatattgtccccaggcactgccctgaactggccgagatgagtagagtgtctatccgcatcctggatgaactggtgctgccattccaggagctgcagattgacgataacgaatacgcatacctgaaagctatcatctttttcgaccccgacgccaagggactgtccgatcctggcaaaattaagcggctgaggagccaggtccaggtgagcctggaggactatatcaatgacagacagtacgattcccgagggcggtttggagaactgctgctgctgctgccaacactgcagtcaattacctggcagatgatcgagcagatccagttcattaaactgttcggcatggcaaagatcgacaacctgctgcaggagatgctgctgggagggtctcccagtgatgcccctcatgctcaccacccactgcatccccacctgatgcaggaacatatgggcactaatgtgatcgtcgcaaacacaatgcctacccacctgagcaatggacagatgtgtgagtggccacgccccaggggccaggccgcaactcctgaaaccccacagccctcccctccagggggatctggcagcgagccctacagactgctgcctggagctgtggcaacaattgtgaagccactgtcagccatcccccagcctaccattactcggcaggaagtcatctgaggactagtccctgttcccagagcccacttttttttctttttttgaaataaaatagcctgtctttcagatctaaaaaaaaaaaaaaaaaaaaaaaaaaaaaaaaaaaaaaaaaaaaaaaaaaaaaaaaaaaaaaaaaaaaaaaaaaaaaaaaaaaaaaaaaaaaaaaaaaaa

SEQ ID NO: 5485 - RNA, 1562 nt, synthetic construct
  misc_feature 1..1562: note = mRNA a-1 (A100) (opt28) from Homo sapiens__NP_000448.3__HNF4A(39-474)(K458R)
  source 1..1562: mol_type = other RNA
aggagagtcccgcagtcggcgtccagcggctctgcttgttcgtgtgtgtgtcgttgcaggccttattcaagcttaccatggacacatctccctcagagggcactaacctgaatgcccctaacagtctgggggtgagcgctctgtgcgcaatctgcggagacagggccaccggcaaacactacggggcttcctcttgtgatggatgcaagggctttttcagacgcagcgtccggaaaaatcatatgtactcatgccgatttagtaggcagtgcgtggtggacaaggacaagagaaaccagtgccgctattgtcggctgaaaaagtgcttcagggcaggaatgaaaaaggaagccgtccagaatgagagagatcgaatttccacacggcgcagctcttacgaagacagctccctgccatcaatcaacgctctgctgcaggcagaggtgctgagtaggcagatcactagccccgtgtctgggattaacggcgatatcagagccaagaaaattgcatccatcgctgacgtctgcgaaagcatgaaggagcagctgctggtgctggtggagtgggccaaatacatccctgcattttgcgaactgccactggacgatcaggtcgctctgctgcgggcccacgcaggagagcatctgctgctgggcgctaccaagcgatcaatggtgttcaaggacgtgctgctgctggggaatgactatattgtccccaggcactgccctgaactggccgagatgagtagagtgtctatccgcatcctggatgaactggtgctgccattccaggagctgcagattgacgataacgaatacgcatacctgaaagctatcatctttttcgaccccgacgccaagggactgtccgatcctggcaaaattaagcggctgaggagccaggtccaggtgagcctggaggactatatcaatgacagacagtacgattcccgagggcggtttggagaactgctgctgctgctgccaacactgcagtcaattacctggcagatgatcgagcagatccagttcattaaactgttcggcatggcaaagatcgacaacctgctgcaggagatgctgctgggagggtctcccagtgatgcccctcatgctcaccacccactgcatccccacctgatgcaggaacatatgggcactaatgtgatcgtcgcaaacacaatgcctacccacctgagcaatggacagatgtgtgagtggccacgccccaggggccaggccgcaactcctgaaaccccacagccctcccctccagggggatctggcagcgagccctacaagctgctgcctggagctgtggcaacaattgtgagaccactgtcagccatcccccagcctaccattactaaacaggaagtcatctgaggactagtccctgttcccagagcccacttttttttctttttttgaaataaaatagcctgtctttcagatctaaaaaaaaaaaaaaaaaaaaaaaaaaaaaaaaaaaaaaaaaaaaaaaaaaaaaaaaaaaaaaaaaaaaaaaaaaaaaaaaaaaaaaaaaaaaaaaaaaaa

SEQ ID NO: 5486 - RNA, 1562 nt, synthetic construct
  misc_feature 1..1562: note = mRNA a-1 (A100) (opt28) from Homo sapiens__NP_000448.3__HNF4A(39-474)(K106R_K108R_K126R_K127R )
  source 1..1562: mol_type = other RNA
aggagagtcccgcagtcggcgtccagcggctctgcttgttcgtgtgtgtgtcgttgcaggccttattcaagcttaccatggacacatctccctcagagggcactaacctgaatgcccctaacagtctgggggtgagcgctctgtgcgcaatctgcggagacagggccaccggcaaacactacggggcttcctcttgtgatggatgcaagggctttttcagacgcagcgtccggaaaaatcatatgtactcatgccgatttagtaggcagtgcgtggtggacagagaccgccggaaccagtgcaggtattgtagactgaagaagtgcttccgagcaggaatgcggcgcgaagccgtccagaatgagagggatagaatttccacacggcgaagctcttacgaagacagctccctgccatcaatcaacgctctgctgcaggcagaggtgctgagtaggcagatcactagccccgtgtctgggattaacggcgatatcagagccaaaaagattgcatccatcgctgacgtctgcgaaagcatgaaagagcagctgctggtgctggtggagtgggccaagtacatccctgcattttgcgaactgccactggacgatcaggtcgctctgctgcgcgcccacgcaggagagcatctgctgctgggcgctaccaagcggtcaatggtgttcaaagacgtgctgctgctggggaatgactatattgtccccaggcactgccctgaactggccgagatgagtagagtgtctatccgaatcctggatgaactggtgctgccattccaggagctgcagattgacgataacgaatacgcatacctgaaggctatcatctttttcgaccccgacgccaaaggactgtccgatcctggcaagattaagcggctgcgcagccaggtccaggtgagcctggaggactatatcaatgacaggcagtacgattccagagggcggtttggagaactgctgctgctgctgccaacactgcagtcaattacctggcagatgatcgagcagatccagttcattaaactgttcggcatggcaaagatcgacaacctgctgcaggagatgctgctgggagggtctcccagtgatgcccctcatgctcaccacccactgcatccccacctgatgcaggaacatatgggcactaatgtgatcgtcgcaaacacaatgcctacccacctgagcaatggacagatgtgtgagtggccacgccccaggggccaggccgcaactcctgaaaccccacagccctcccctccagggggatctggcagcgagccctacaaactgctgcctggagctgtggcaacaattgtgaagccactgtcagccatcccccagcctaccattactaaacaggaagtcatctgaggactagtccctgttcccagagcccacttttttttctttttttgaaataaaatagcctgtctttcagatctaaaaaaaaaaaaaaaaaaaaaaaaaaaaaaaaaaaaaaaaaaaaaaaaaaaaaaaaaaaaaaaaaaaaaaaaaaaaaaaaaaaaaaaaaaaaaaaaaaaa

SEQ ID NO: 5487 - RNA, 1562 nt, synthetic construct
  misc_feature 1..1562: note = mRNA a-1 (A100) (opt28) from Homo sapiens__NP_000448.3__HNF4A(39-474)(E285Q)
  source 1..1562: mol_type = other RNA
aggagagtcccgcagtcggcgtccagcggctctgcttgttcgtgtgtgtgtcgttgcaggccttattcaagcttaccatggacacatctccctcagagggcactaacctgaatgcccctaacagtctgggggtgagcgctctgtgcgcaatctgcggagacagggccaccggcaaacactacggggcttcctcttgtgatggatgcaagggctttttcagacgcagcgtccggaaaaatcatatgtactcatgccgatttagtaggcagtgcgtggtggacaaggacaagagaaaccagtgccgctattgtcggctgaaaaagtgcttcagggcaggaatgaaaaaggaagccgtccagaatgagagagatcgaatttccacacggcgcagctcttacgaagacagctccctgccatcaatcaacgctctgctgcaggcagaggtgctgagtaggcagatcactagccccgtgtctgggattaacggcgatatcagagccaagaaaattgcatccatcgctgacgtctgcgaaagcatgaaggagcagctgctggtgctggtggagtgggccaaatacatccctgcattttgcgaactgccactggacgatcaggtcgctctgctgcgggcccacgcaggagagcatctgctgctgggcgctaccaagcgatcaatggtgttcaaggacgtgctgctgctggggaatgactatattgtccccaggcactgccctgaactggccgagatgagtagagtgtctatccgcatcctggatgaactggtgctgccattccaggagctgcagattgacgataaccagtacgcatacctgaaagctatcatctttttcgaccccgacgccaagggactgtccgatcctggcaaaattaagcggctgaggagccaggtccaggtgagcctggaagactatatcaatgacagacagtacgattcccgagggcggtttggagagctgctgctgctgctgccaacactgcagtcaattacctggcagatgatcgaacagatccagttcattaaactgttcggcatggcaaagatcgacaacctgctgcaggagatgctgctgggagggtctcccagtgatgcccctcatgctcaccacccactgcatccccacctgatgcaggagcatatgggcactaatgtgatcgtcgcaaacacaatgcctacccacctgagcaatggacagatgtgtgaatggccacgccccaggggccaggccgcaactcctgagaccccacagccctcccctccagggggatctggcagcgaaccctacaagctgctgcctggagctgtggcaacaattgtgaaaccactgtcagccatcccccagcctaccattactaagcaggaggtcatctgaggactagtccctgttcccagagcccacttttttttctttttttgaaataaaatagcctgtctttcagatctaaaaaaaaaaaaaaaaaaaaaaaaaaaaaaaaaaaaaaaaaaaaaaaaaaaaaaaaaaaaaaaaaaaaaaaaaaaaaaaaaaaaaaaaaaaaaaaaaaaa

SEQ ID NO: 5488 - RNA, 1562 nt, synthetic construct
  misc_feature 1..1562: note = mRNA a-1 (A100) (opt28) from Homo sapiens__NP_000448.3__HNF4A(39-474)(T166E)
  source 1..1562: mol_type = other RNA
aggagagtcccgcagtcggcgtccagcggctctgcttgttcgtgtgtgtgtcgttgcaggccttattcaagcttaccatggacacatctccctcagagggcactaacctgaatgcccctaacagtctgggggtgagcgctctgtgcgcaatctgcggagacagggccaccggcaaacactacggggcttcctcttgtgatggatgcaagggctttttcagacgcagcgtccggaaaaatcatatgtactcatgccgatttagtaggcagtgcgtggtggacaaggacaagagaaaccagtgccgctattgtcggctgaaaaagtgcttcagggcaggaatgaaaaaggaagccgtccagaatgagagagatcgaatttccacacggcgcagctcttacgaagacagctccctgccatcaatcaacgctctgctgcaggcagaggtgctgagtaggcagatcgaaagccccgtgtctgggattaacggcgatatcagagccaagaaaattgcatccatcgctgacgtctgcgagagcatgaaggagcagctgctggtgctggtggaatgggccaaatacatccctgcattttgcgagctgccactggacgatcaggtcgctctgctgcgggcccacgcaggagaacatctgctgctgggcgctactaagcgatcaatggtgttcaaggacgtgctgctgctggggaatgactatattgtccccaggcactgccctgagctggccgaaatgagtagagtgtctatccgcatcctggatgagctggtgctgccattccaggaactgcagattgacgataacgagtacgcatacctgaaagctatcatctttttcgaccccgacgccaagggactgtccgatcctggcaaaattaagcggctgaggagccaggtccaggtgagcctggaagactatatcaatgacagacagtacgattcccgagggcggtttggagagctgctgctgctgctgccaaccctgcagtcaattacatggcagatgatcgagcagatccagttcattaaactgttcggcatggcaaagatcgacaacctgctgcaggaaatgctgctgggagggtctcccagtgatgcccctcatgctcaccacccactgcatccccacctgatgcaggagcatatgggcaccaatgtgatcgtcgcaaacactatgcctacacacctgagcaatggacagatgtgtgaatggccacgccccaggggccaggccgcaacccctgagactccacagccctcccctccagggggatctggcagcgaaccctacaagctgctgcctggagctgtggcaaccattgtgaaaccactgtcagccatcccccagcctacaattaccaagcaggaggtcatctgaggactagtccctgttcccagagcccacttttttttctttttttgaaataaaatagcctgtctttcagatctaaaaaaaaaaaaaaaaaaaaaaaaaaaaaaaaaaaaaaaaaaaaaaaaaaaaaaaaaaaaaaaaaaaaaaaaaaaaaaaaaaaaaaaaaaaaaaaaaaaa

SEQ ID NO: 5489 - RNA, 1562 nt, synthetic construct
  misc_feature 1..1562: note = mRNA a-1 (A100) (opt28) from Homo sapiens__NP_000448.3__HNF4A(39-474)(S148A)
  source 1..1562: mol_type = other RNA
aggagagtcccgcagtcggcgtccagcggctctgcttgttcgtgtgtgtgtcgttgcaggccttattcaagcttaccatggacacatctccctcagagggcactaacctgaatgcccctaacagtctgggggtgagcgctctgtgcgcaatctgcggagacagggccaccggcaaacactacggggcttcctcttgtgatggatgcaagggctttttcagacgcagcgtccggaaaaatcatatgtactcatgccgatttagtaggcagtgcgtggtggacaaggacaagagaaaccagtgccgctattgtcggctgaaaaagtgcttcagggcaggaatgaaaaaggaagccgtccagaatgagagagatcgaatttccacacggcgcagctcttacgaagacagcgctctgccatccatcaacgcactgctgcaggccgaggtgctgtcaaggcagatcaccagtcccgtgagcgggattaacggcgatatcagagcaaagaaaattgcttctatcgccgacgtctgcgaatccatgaaggagcagctgctggtgctggtggagtgggcaaaatacatccctgctttttgcgaactgccactggacgatcaggtcgccctgctgcgggcacacgctggagagcatctgctgctgggcgccactaagcgaagcatggtgttcaaggacgtgctgctgctggggaatgactatattgtccccaggcactgccctgaactggcagagatgtcaagagtgagtatccgcatcctggatgaactggtgctgccattccaggagctgcagattgacgataacgaatacgcttacctgaaagccatcatctttttcgaccccgacgcaaagggactgtctgatcctggcaaaattaagcggctgaggtcccaggtccaggtgagcctggaggactatatcaatgacagacagtacgatagccgagggcggtttggagaactgctgctgctgctgccaacactgcagtccattacctggcagatgatcgagcagatccagttcattaaactgttcggcatggccaagatcgacaacctgctgcaggagatgctgctgggagggtcaccctctgatgctcctcatgcacaccacccactgcatccccacctgatgcaggaacatatgggcactaatgtgatcgtcgccaacacaatgcctacccacctgagtaatggacagatgtgtgagtggccacgccccaggggccaggcagctactcctgaaaccccacagcccagccctccagggggatccggctctgagccctacaagctgctgcctggagcagtggccacaattgtgaaaccactgagcgctatcccccagcctaccattactaagcaggaagtcatctgaggactagtccctgttcccagagcccacttttttttctttttttgaaataaaatagcctgtctttcagatctaaaaaaaaaaaaaaaaaaaaaaaaaaaaaaaaaaaaaaaaaaaaaaaaaaaaaaaaaaaaaaaaaaaaaaaaaaaaaaaaaaaaaaaaaaaaaaaaaaaa

SEQ ID NO: 5490 - RNA, 1562 nt, synthetic construct
  misc_feature 1..1562: note = mRNA a-1 (A100) (opt28) from Homo sapiens__NP_000448.3__HNF4A(39-474)(S148E)
  source 1..1562: mol_type = other RNA
aggagagtcccgcagtcggcgtccagcggctctgcttgttcgtgtgtgtgtcgttgcaggccttattcaagcttaccatggacacatctccctcagagggcactaacctgaatgcccctaacagtctgggggtgagcgctctgtgcgcaatctgcggagacagggccaccggcaaacactacggggcttcctcttgtgatggatgcaagggctttttcagacgcagcgtccggaaaaatcatatgtactcatgccgatttagtaggcagtgcgtggtggacaaggacaagagaaaccagtgccgctattgtcggctgaaaaagtgcttcagggcaggaatgaaaaaggaagccgtccagaatgagagagatcgaatttccacacggcgcagctcttacgaagacagcgagctgccatccatcaacgctctgctgcaggcagaagtgctgtcaaggcagatcaccagtcccgtgagcgggattaacggcgatatcagagccaagaaaattgcatctatcgctgacgtctgcgagtccatgaaggagcagctgctggtgctggtggaatgggccaaatacatccctgcattttgcgagctgccactggacgatcaggtcgctctgctgcgggcccacgcaggagaacatctgctgctgggcgctactaagcgaagcatggtgttcaaggacgtgctgctgctggggaatgactatattgtccccaggcactgccctgagctggccgaaatgtcaagagtgagtatccgcatcctggatgagctggtgctgccattccaggaactgcagattgacgataacgagtacgcatacctgaaagctatcatctttttcgaccccgacgccaagggactgtctgatcctggcaaaattaagcggctgaggtcccaggtccaggtgagcctggaagactatatcaatgacagacagtacgatagccgagggcggtttggagagctgctgctgctgctgccaacactgcagtccattacctggcagatgatcgagcagatccagttcattaaactgttcggcatggcaaagatcgacaacctgctgcaggaaatgctgctgggagggtcaccctctgatgcccctcatgctcaccacccactgcatccccacctgatgcaggagcatatgggcactaatgtgatcgtcgcaaacacaatgcctacccacctgagtaatggacagatgtgtgaatggccacgccccaggggccaggccgcaactcctgagaccccacagcccagccctccagggggatccggctctgaaccctacaagctgctgcctggagctgtggcaacaattgtgaaaccactgagcgccatcccccagcctaccattactaagcaggaggtcatctgaggactagtccctgttcccagagcccacttttttttctttttttgaaataaaatagcctgtctttcagatctaaaaaaaaaaaaaaaaaaaaaaaaaaaaaaaaaaaaaaaaaaaaaaaaaaaaaaaaaaaaaaaaaaaaaaaaaaaaaaaaaaaaaaaaaaaaaaaaaaaa

SEQ ID NO: 5491 - RNA, 1562 nt, synthetic construct
  misc_feature 1..1562: note = mRNA a-1 (A100) (opt28) from Homo sapiens__NP_000448.3__HNF4A(39-474)(S183A)
  source 1..1562: mol_type = other RNA
aggagagtcccgcagtcggcgtccagcggctctgcttgttcgtgtgtgtgtcgttgcaggccttattcaagcttaccatggacacatctccctcagagggcactaacctgaatgcccctaacagtctgggggtgagcgctctgtgcgcaatctgcggagacagggccaccggcaaacactacggggcttcctcttgtgatggatgcaagggctttttcagacgcagcgtccggaaaaatcatatgtactcatgccgatttagtaggcagtgcgtggtggacaaggacaagagaaaccagtgccgctattgtcggctgaaaaagtgcttcagggcaggaatgaaaaaggaagccgtccagaatgagagagatcgaatttccacacggcgcagctcttacgaagacagctccctgccatcaatcaacgctctgctgcaggcagaggtgctgagtaggcagatcactagccccgtgtctgggattaacggcgatatcagagccaagaaaattgcagctatcgccgacgtctgcgaatccatgaaggagcagctgctggtgctggtggagtgggcaaaatacatccctgctttttgcgaactgccactggacgatcaggtcgccctgctgcgggcacacgctggagagcatctgctgctgggcgccaccaagcgaagcatggtgttcaaggacgtgctgctgctggggaatgactatattgtccccaggcactgccctgaactggcagagatgtcaagagtgagtatccgcatcctggatgaactggtgctgccattccaggagctgcagattgacgataacgaatacgcttacctgaaagccatcatctttttcgaccccgacgcaaagggactgtctgatcctggcaaaattaagcggctgaggtcccaggtccaggtgagcctggaggactatatcaatgacagacagtacgatagccgagggcggtttggagaactgctgctgctgctgccaacactgcagtccattacctggcagatgatcgagcagatccagttcattaaactgttcggcatggccaagatcgacaacctgctgcaggagatgctgctgggagggtcaccctctgatgctcctcatgcacaccacccactgcatccccacctgatgcaggaacatatgggcactaatgtgatcgtcgccaacacaatgcctacccacctgagtaatggacagatgtgtgagtggccacgccccaggggccaggcagctactcctgaaaccccacagcccagccctccagggggatccggctctgagccctacaagctgctgcctggagcagtggccacaattgtgaaaccactgagcgctatcccccagcctaccattactaagcaggaagtcatctgaggactagtccctgttcccagagcccacttttttttctttttttgaaataaaatagcctgtctttcagatctaaaaaaaaaaaaaaaaaaaaaaaaaaaaaaaaaaaaaaaaaaaaaaaaaaaaaaaaaaaaaaaaaaaaaaaaaaaaaaaaaaaaaaaaaaaaaaaaaaaa

SEQ ID NO: 5492 - RNA, 1562 nt, synthetic construct
  misc_feature 1..1562: note = mRNA a-1 (A100) (opt28) from Homo sapiens__NP_000448.3__HNF4A(39-474)(S183E)
  source 1..1562: mol_type = other RNA
aggagagtcccgcagtcggcgtccagcggctctgcttgttcgtgtgtgtgtcgttgcaggccttattcaagcttaccatggacacatctccctcagagggcactaacctgaatgcccctaacagtctgggggtgagcgctctgtgcgcaatctgcggagacagggccaccggcaaacactacggggcttcctcttgtgatggatgcaagggctttttcagacgcagcgtccggaaaaatcatatgtactcatgccgatttagtaggcagtgcgtggtggacaaggacaagagaaaccagtgccgctattgtcggctgaaaaagtgcttcagggcaggaatgaaaaaggaagccgtccagaatgagagagatcgaatttccacacggcgcagctcttacgaagacagctccctgccatcaatcaacgctctgctgcaggcagaggtgctgagtaggcagatcactagccccgtgtctgggattaacggcgatatcagagccaagaaaattgcagaaatcgctgacgtctgcgagtccatgaaggagcagctgctggtgctggtggaatgggccaaatacatccctgcattttgcgagctgccactggacgatcaggtcgctctgctgcgggcccacgcaggagaacatctgctgctgggcgctaccaagcgaagcatggtgttcaaggacgtgctgctgctggggaatgactatattgtccccaggcactgccctgagctggccgaaatgtcaagagtgagtatccgcatcctggatgagctggtgctgccattccaggaactgcagattgacgataacgagtacgcatacctgaaagctatcatctttttcgaccccgacgccaagggactgtctgatcctggcaaaattaagcggctgaggtcccaggtccaggtgagcctggaagactatatcaatgacagacagtacgatagccgagggcggtttggagagctgctgctgctgctgccaacactgcagtccattacctggcagatgatcgagcagatccagttcattaaactgttcggcatggcaaagatcgacaacctgctgcaggaaatgctgctgggagggtcaccctctgatgcccctcatgctcaccacccactgcatccccacctgatgcaggagcatatgggcactaatgtgatcgtcgcaaacacaatgcctacccacctgagtaatggacagatgtgtgaatggccacgccccaggggccaggccgcaactcctgagaccccacagcccagccctccagggggatccggctctgaaccctacaagctgctgcctggagctgtggcaacaattgtgaaaccactgagcgccatcccccagcctaccattactaagcaggaggtcatctgaggactagtccctgttcccagagcccacttttttttctttttttgaaataaaatagcctgtctttcagatctaaaaaaaaaaaaaaaaaaaaaaaaaaaaaaaaaaaaaaaaaaaaaaaaaaaaaaaaaaaaaaaaaaaaaaaaaaaaaaaaaaaaaaaaaaaaaaaaaaaa

SEQ ID NO: 5493 - RNA, 1562 nt, synthetic construct
  misc_feature 1..1562: note = mRNA a-1 (A100) (opt28) from Homo sapiens__NP_000448.3__HNF4A(39-474)(S461A)
  source 1..1562: mol_type = other RNA
aggagagtcccgcagtcggcgtccagcggctctgcttgttcgtgtgtgtgtcgttgcaggccttattcaagcttaccatggacacatctccctcagagggcactaacctgaatgcccctaacagtctgggggtgagcgctctgtgcgcaatctgcggagacagggccaccggcaaacactacggggcttcctcttgtgatggatgcaagggctttttcagacgcagcgtccggaaaaatcatatgtactcatgccgatttagtaggcagtgcgtggtggacaaggacaagagaaaccagtgccgctattgtcggctgaaaaagtgcttcagggcaggaatgaaaaaggaagccgtccagaatgagagagatcgaatttccacacggcgcagctcttacgaagacagctccctgccatcaatcaacgctctgctgcaggcagaggtgctgagtaggcagatcactagccccgtgtctgggattaacggcgatatcagagccaagaaaattgcatccatcgctgacgtctgcgaaagcatgaaggagcagctgctggtgctggtggagtgggccaaatacatccctgcattttgcgaactgccactggacgatcaggtcgctctgctgcgggcccacgcaggagagcatctgctgctgggcgctaccaagcgatcaatggtgttcaaggacgtgctgctgctggggaatgactatattgtccccaggcactgccctgaactggccgagatgagtagagtgtctatccgcatcctggatgaactggtgctgccattccaggagctgcagattgacgataacgaatacgcatacctgaaagctatcatctttttcgaccccgacgccaagggactgtccgatcctggcaaaattaagcggctgaggagccaggtccaggtgagcctggaggactatatcaatgacagacagtacgattcccgagggcggtttggagaactgctgctgctgctgccaacactgcagtcaattacctggcagatgatcgagcagatccagttcattaaactgttcggcatggcaaagatcgacaacctgctgcaggagatgctgctgggagggtctcccagtgatgcccctcatgctcaccacccactgcatccccacctgatgcaggaacatatgggcactaatgtgatcgtcgcaaacacaatgcctacccacctgagcaatggacagatgtgtgagtggccacgccccaggggccaggccgcaactcctgaaaccccacagccctcccctccagggggatctggcagcgagccctacaagctgctgcctggagctgtggcaacaattgtgaaaccactggccgctatcccccagcctaccattactaagcaggaagtcatctgaggactagtccctgttcccagagcccacttttttttctttttttgaaataaaatagcctgtctttcagatctaaaaaaaaaaaaaaaaaaaaaaaaaaaaaaaaaaaaaaaaaaaaaaaaaaaaaaaaaaaaaaaaaaaaaaaaaaaaaaaaaaaaaaaaaaaaaaaaaaaa

SEQ ID NO: 5494 - RNA, 1562 nt, synthetic construct
  misc_feature 1..1562: note = mRNA a-1 (A100) (opt28) from Homo sapiens__NP_000448.3__HNF4A(39-474)(S461E)
  source 1..1562: mol_type = other RNA
aggagagtcccgcagtcggcgtccagcggctctgcttgttcgtgtgtgtgtcgttgcaggccttattcaagcttaccatggacacatctccctcagagggcactaacctgaatgcccctaacagtctgggggtgagcgctctgtgcgcaatctgcggagacagggccaccggcaaacactacggggcttcctcttgtgatggatgcaagggctttttcagacgcagcgtccggaaaaatcatatgtactcatgccgatttagtaggcagtgcgtggtggacaaggacaagagaaaccagtgccgctattgtcggctgaaaaagtgcttcagggcaggaatgaaaaaggaagccgtccagaatgagagagatcgaatttccacacggcgcagctcttacgaagacagctccctgccatcaatcaacgctctgctgcaggcagaggtgctgagtaggcagatcactagccccgtgtctgggattaacggcgatatcagagccaagaaaattgcatccatcgctgacgtctgcgaaagcatgaaggagcagctgctggtgctggtggagtgggccaaatacatccctgcattttgcgaactgccactggacgatcaggtcgctctgctgcgggcccacgcaggagagcatctgctgctgggcgctaccaagcgatcaatggtgttcaaggacgtgctgctgctggggaatgactatattgtccccaggcactgccctgaactggccgagatgagtagagtgtctatccgcatcctggatgaactggtgctgccattccaggagctgcagattgacgataacgaatacgcatacctgaaagctatcatctttttcgaccccgacgccaagggactgtccgatcctggcaaaattaagcggctgaggagccaggtccaggtgagcctggaggactatatcaatgacagacagtacgattcccgagggcggtttggagaactgctgctgctgctgccaacactgcagtcaattacctggcagatgatcgagcagatccagttcattaaactgttcggcatggcaaagatcgacaacctgctgcaggagatgctgctgggagggtctcccagtgatgcccctcatgctcaccacccactgcatccccacctgatgcaggaacatatgggcactaatgtgatcgtcgcaaacacaatgcctacccacctgagcaatggacagatgtgtgagtggccacgccccaggggccaggccgcaactcctgaaaccccacagccctcccctccagggggatctggcagcgagccctacaagctgctgcctggagctgtggcaacaattgtgaaaccactggaagccatcccccagcctaccattactaagcaggaggtcatctgaggactagtccctgttcccagagcccacttttttttctttttttgaaataaaatagcctgtctttcagatctaaaaaaaaaaaaaaaaaaaaaaaaaaaaaaaaaaaaaaaaaaaaaaaaaaaaaaaaaaaaaaaaaaaaaaaaaaaaaaaaaaaaaaaaaaaaaaaaaaaa

SEQ ID NO: 5495 - RNA, 1562 nt, synthetic construct
  misc_feature 1..1562: note = mRNA a-1 (A100) (opt28) from Homo sapiens__NP_000448.3__HNF4A(39-474)(S142A_S143A_S313A)
  source 1..1562: mol_type = other RNA
aggagagtcccgcagtcggcgtccagcggctctgcttgttcgtgtgtgtgtcgttgcaggccttattcaagcttaccatggacacatctccctcagagggcactaacctgaatgcccctaacagtctgggggtgagcgctctgtgcgcaatctgcggagacagggccaccggcaaacactacggggcttcctcttgtgatggatgcaagggctttttcagacgcagcgtccggaaaaatcatatgtactcatgccgatttagtaggcagtgcgtggtggacaaggacaagagaaaccagtgccgctattgtcggctgaaaaagtgcttcagggcaggaatgaaaaaggaagccgtccagaatgagagagatcgaatttccacacggcgcgctgcatacgaagacagctctctgccaagcatcaacgccctgctgcaggcagaggtgctgtccaggcagatcacttcacccgtgagtgggattaacggcgatatcagagctaagaaaattgccagcatcgcagacgtctgcgaatctatgaaggagcagctgctggtgctggtggagtgggctaaatacatccctgccttttgcgaactgccactggacgatcaggtcgcactgctgcgggctcacgccggagagcatctgctgctgggcgcaaccaagcgatccatggtgttcaaggacgtgctgctgctggggaatgactatattgtccccaggcactgccctgaactggctgagatgagcagagtgtcaatccgcatcctggatgaactggtgctgccattccaggagctgcagattgacgataacgaatacgcctacctgaaagcaatcatctttttcgaccccgacgccaagggactgagtgatcctggcaaaattaagcggctgagggctcaggtccaggtgtctctggaggactatatcaatgacagacagtacgattcccgagggcggtttggagaactgctgctgctgctgccaacactgcagagcattacctggcagatgatcgagcagatccagttcattaaactgttcggcatggcaaagatcgacaacctgctgcaggagatgctgctgggagggagcccctccgatgcccctcatgcacaccacccactgcatccccacctgatgcaggaacatatgggcactaatgtgatcgtcgctaacacaatgcctacccacctgtcaaatggacagatgtgtgagtggccacgccccaggggccaggcagccactcctgaaaccccacagccctctcctccagggggaagtggcagcgagccctacaagctgctgcctggagctgtggcaacaattgtgaaaccactgtccgccatcccccagcctaccattactaagcaggaagtcatctgaggactagtccctgttcccagagcccacttttttttctttttttgaaataaaatagcctgtctttcagatctaaaaaaaaaaaaaaaaaaaaaaaaaaaaaaaaaaaaaaaaaaaaaaaaaaaaaaaaaaaaaaaaaaaaaaaaaaaaaaaaaaaaaaaaaaaaaaaaaaaa

SEQ ID NO: 5496 - RNA, 1562 nt, synthetic construct
  misc_feature 1..1562: note = mRNA a-1 (A100) (opt28) from Homo sapiens__NP_000448.3__HNF4A(39-474)(S142A_S143A_S313A_K458R )
  source 1..1562: mol_type = other RNA
aggagagtcccgcagtcggcgtccagcggctctgcttgttcgtgtgtgtgtcgttgcaggccttattcaagcttaccatggacacatctccctcagagggcactaacctgaatgcccctaacagtctgggggtgagcgctctgtgcgcaatctgcggagacagggccaccggcaaacactacggggcttcctcttgtgatggatgcaagggctttttcagacgcagcgtccggaaaaatcatatgtactcatgccgatttagtaggcagtgcgtggtggacaaggacaagagaaaccagtgccgctattgtcggctgaaaaagtgcttcagggcaggaatgaaaaaggaagccgtccagaatgagagagatcgaatttccacacggcgcgctgcatacgaagacagctctctgccaagcatcaacgccctgctgcaggcagaggtgctgtccaggcagatcacttcacccgtgagtgggattaacggcgatatcagagctaagaaaattgccagcatcgcagacgtctgcgaatctatgaaggagcagctgctggtgctggtggagtgggctaaatacatccctgccttttgcgaactgccactggacgatcaggtcgcactgctgcgggctcacgccggagagcatctgctgctgggcgcaaccaagcgatccatggtgttcaaggacgtgctgctgctggggaatgactatattgtccccaggcactgccctgaactggctgagatgagcagagtgtcaatccgcatcctggatgaactggtgctgccattccaggagctgcagattgacgataacgaatacgcctacctgaaagcaatcatctttttcgaccccgacgccaagggactgagtgatcctggcaaaattaagcggctgagggctcaggtccaggtgtctctggaggactatatcaatgacagacagtacgattcccgagggcggtttggagaactgctgctgctgctgccaacactgcagagcattacctggcagatgatcgagcagatccagttcattaaactgttcggcatggcaaagatcgacaacctgctgcaggagatgctgctgggagggagcccctccgatgcccctcatgcacaccacccactgcatccccacctgatgcaggaacatatgggcactaatgtgatcgtcgctaacacaatgcctacccacctgtcaaatggacagatgtgtgagtggccacgccccaggggccaggcagccactcctgaaaccccacagccctctcctccagggggaagtggcagcgagccctacaagctgctgcctggagctgtggcaacaattgtgagaccactgtccgccatcccccagcctaccattactaaacaggaagtcatctgaggactagtccctgttcccagagcccacttttttttctttttttgaaataaaatagcctgtctttcagatctaaaaaaaaaaaaaaaaaaaaaaaaaaaaaaaaaaaaaaaaaaaaaaaaaaaaaaaaaaaaaaaaaaaaaaaaaaaaaaaaaaaaaaaaaaaaaaaaaaaa

SEQ ID NO: 5497 - RNA, 1562 nt, synthetic construct
  misc_feature 1..1562: note = mRNA a-1 (A100) (opt28) from Homo sapiens__NP_000448.3__HNF4A(39-474)(S142A_S143A_S167A_S313A _S378A_T429A_T432A_S436A_K458R)
  source 1..1562: mol_type = other RNA
aggagagtcccgcagtcggcgtccagcggctctgcttgttcgtgtgtgtgtcgttgcaggccttattcaagcttaccatggacacatctccctcagagggcactaacctgaatgcccctaacagtctgggggtgagcgctctgtgcgcaatctgcggagacagggccaccggcaaacactacggggcttcctcttgtgatggatgcaagggctttttcagacgcagcgtccggaaaaatcatatgtactcatgccgatttagtaggcagtgcgtggtggacaaggacaagagaaaccagtgccgctattgtcggctgaaaaagtgcttcagggcaggaatgaaaaaggaagccgtccagaatgagagagatcgaatttccacacggcgcgctgcatacgaagacagctctctgccaagcatcaacgccctgctgcaggcagaggtgctgtccaggcagatcactgctcccgtgtcagggattaacggcgatatcagagccaagaaaattgcaagtatcgctgacgtctgcgaaagcatgaaggagcagctgctggtgctggtggagtgggccaaatacatccctgcattttgcgaactgccactggacgatcaggtcgctctgctgcgggcccacgcaggagagcatctgctgctgggcgctaccaagcgatctatggtgttcaaggacgtgctgctgctggggaatgactatattgtccccaggcactgccctgaactggccgagatgtccagagtgagcatccgcatcctggatgaactggtgctgccattccaggagctgcagattgacgataacgaatacgcatacctgaaagccatcatctttttcgaccccgacgctaagggactgtcagatcctggcaaaattaagcggctgagggcacaggtccaggtgagtctggaggactatatcaatgacagacagtacgattctcgagggcggtttggagaactgctgctgctgctgccaacactgcagtccattacctggcagatgatcgagcagatccagttcattaaactgttcggcatggccaagatcgacaacctgctgcaggagatgctgctgggaggggcacccagcgatgctcctcatgcacaccacccactgcatccccacctgatgcaggaacatatgggcactaatgtgatcgtcgccaacacaatgcctacccacctgagcaatggacagatgtgtgagtggccacgccccaggggccaggctgcagcccctgaagctccacagcccgcacctccagggggatccggctcagagccctacaagctgctgcctggagccgtggctactattgtgagaccactgtctgcaatcccccagcctaccattacaaaacaggaagtcatctgaggactagtccctgttcccagagcccacttttttttctttttttgaaataaaatagcctgtctttcagatctaaaaaaaaaaaaaaaaaaaaaaaaaaaaaaaaaaaaaaaaaaaaaaaaaaaaaaaaaaaaaaaaaaaaaaaaaaaaaaaaaaaaaaaaaaaaaaaaaaaa

SEQ ID NO: 5498 - RNA, 1562 nt, synthetic construct
  misc_feature 1..1562: note = mRNA a-1 (A100) (opt28) from Homo sapiens__NP_000448.3__HNF4A(39-474)(S142A_S143A_S148A_S167A _S313A_S378A_T429A_T432A_S436A_K458R)
  source 1..1562: mol_type = other RNA
aggagagtcccgcagtcggcgtccagcggctctgcttgttcgtgtgtgtgtcgttgcaggccttattcaagcttaccatggacacatctccctcagagggcactaacctgaatgcccctaacagtctgggggtgagcgctctgtgcgcaatctgcggagacagggccaccggcaaacactacggggcttcctcttgtgatggatgcaagggctttttcagacgcagcgtccggaaaaatcatatgtactcatgccgatttagtaggcagtgcgtggtggacaaggacaagagaaaccagtgccgctattgtcggctgaaaaagtgcttcagggcaggaatgaaaaaggaagccgtccagaatgagagagatcgaatttccacacggcgcgctgcatacgaagacagcgccctgccatctatcaacgcactgctgcaggctgaggtgctgagcaggcagatcactgcccccgtgtccgggattaacggcgatatcagagcaaagaaaattgcttcaatcgccgacgtctgcgaaagtatgaaggagcagctgctggtgctggtggagtgggcaaaatacatccctgctttttgcgaactgccactggacgatcaggtcgccctgctgcgggcacacgctggagagcatctgctgctgggcgccaccaagcgaagcatggtgttcaaggacgtgctgctgctggggaatgactatattgtccccaggcactgccctgaactggcagagatgtctagagtgtccatccgcatcctggatgaactggtgctgccattccaggagctgcagattgacgataacgaatacgcctacctgaaagctatcatctttttcgaccccgacgcaaagggactgagcgatcctggcaaaattaagcggctgagggcccaggtccaggtgtcactggaggactatatcaatgacagacagtacgatagtcgagggcggtttggagaactgctgctgctgctgccaacactgcagtctattacctggcagatgatcgagcagatccagttcattaaactgttcggcatggcaaagatcgacaacctgctgcaggagatgctgctgggaggggctccctccgatgcacctcatgcccaccacccactgcatccccacctgatgcaggaacatatgggcactaatgtgatcgtcgctaacacaatgcctacccacctgagcaatggacagatgtgtgagtggccacgccccaggggccaggcagccgctcctgaagcaccacagcccgcccctccagggggaagcggctccgagccctacaagctgctgcctggagctgtggcaactattgtgagaccactgtcagccatcccccagcctaccattacaaaacaggaagtcatctgaggactagtccctgttcccagagcccacttttttttctttttttgaaataaaatagcctgtctttcagatctaaaaaaaaaaaaaaaaaaaaaaaaaaaaaaaaaaaaaaaaaaaaaaaaaaaaaaaaaaaaaaaaaaaaaaaaaaaaaaaaaaaaaaaaaaaaaaaaaaaa

SEQ ID NO: 5499 - RNA, 1562 nt, synthetic construct
  misc_feature 1..1562: note = mRNA a-1 (A100) (opt28) from Homo sapiens__NP_000448.3__HNF4A(39-474)(K106R_K108R_K126R_K127R _S142A_S143A_S148A_S167A_S313A_S378A_T429A_T432A_S436A_K458 R)
  source 1..1562: mol_type = other RNA
aggagagtcccgcagtcggcgtccagcggctctgcttgttcgtgtgtgtgtcgttgcaggccttattcaagcttaccatggacacatctccctcagagggcactaacctgaatgcccctaacagtctgggggtgagcgctctgtgcgcaatctgcggagacagggccaccggcaaacactacggggcttcctcttgtgatggatgcaagggctttttcagacgcagcgtccggaaaaatcatatgtactcatgccgatttagtaggcagtgcgtggtggacagagaccgccggaaccagtgcaggtattgtagactgaagaagtgcttccgagcaggaatgcggcgcgaagccgtccagaatgagagggatagaatttccacacggcgagctgcatacgaagacagcgccctgccatctatcaacgcactgctgcaggctgaggtgctgagcaggcagatcactgcccccgtgtccgggattaacggcgatatcagagctaaaaagattgcatcaatcgccgacgtctgcgaaagtatgaaagagcagctgctggtgctggtggagtgggcaaagtacatccctgctttttgcgaactgccactggacgatcaggtcgccctgctgcgcgcacacgctggagagcatctgctgctgggcgccaccaagcggagcatggtgttcaaagacgtgctgctgctggggaatgactatattgtccccaggcactgccctgaactggcagagatgtctagagtgtccatccgaatcctggatgaactggtgctgccattccaggagctgcagattgacgataacgaatacgcctacctgaaggctatcatctttttcgaccccgacgcaaaaggactgagcgatcctggcaagattaagcggctgcgcgcccaggtccaggtgtcactggaggactatatcaatgacaggcagtacgatagtagagggcggtttggagaactgctgctgctgctgccaacactgcagtctattacctggcagatgatcgagcagatccagttcattaaactgttcggcatggcaaagatcgacaacctgctgcaggagatgctgctgggaggggctccctccgatgcacctcatgcccaccacccactgcatccccacctgatgcaggaacatatgggcactaatgtgatcgtcgctaacacaatgcctacccacctgagcaatggacagatgtgtgagtggccacgccccaggggccaggcagccgctcctgaagcaccacagcccgcccctccagggggaagcggctccgagccctacaaactgctgcctggagctgtggcaactattgtgagaccactgtcagccatcccccagcctaccattacaaagcaggaagtcatctgaggactagtccctgttcccagagcccacttttttttctttttttgaaataaaatagcctgtctttcagatctaaaaaaaaaaaaaaaaaaaaaaaaaaaaaaaaaaaaaaaaaaaaaaaaaaaaaaaaaaaaaaaaaaaaaaaaaaaaaaaaaaaaaaaaaaaaaaaaaaaa

SEQ ID NO: 5500 - RNA, 1562 nt, synthetic construct
  misc_feature 1..1562: note = mRNA a-1 (A100) (opt28) from Homo sapiens__NP_000448.3__HNF4A(39-474)(S142A_S143A_S148A_T166A _S167A_S313A_S378A_T429A_T432A_S436A_K458R)
  source 1..1562: mol_type = other RNA
aggagagtcccgcagtcggcgtccagcggctctgcttgttcgtgtgtgtgtcgttgcaggccttattcaagcttaccatggacacatctccctcagagggcactaacctgaatgcccctaacagtctgggggtgagcgctctgtgcgcaatctgcggagacagggccaccggcaaacactacggggcttcctcttgtgatggatgcaagggctttttcagacgcagcgtccggaaaaatcatatgtactcatgccgatttagtaggcagtgcgtggtggacaaggacaagagaaaccagtgccgctattgtcggctgaaaaagtgcttcagggcaggaatgaaaaaggaagccgtccagaatgagagagatcgaatttccacacggcgcgctgcatacgaagacagcgccctgccatctatcaacgcactgctgcaggctgaggtgctgagcaggcagatcgccgcacccgtgtccgggattaacggcgatatcagagctaagaaaattgcctcaatcgcagacgtctgcgaaagtatgaaggagcagctgctggtgctggtggagtgggctaaatacatccctgccttttgcgaactgccactggacgatcaggtcgcactgctgcgggctcacgccggagagcatctgctgctgggcgcaactaagcgaagcatggtgttcaaggacgtgctgctgctggggaatgactatattgtccccaggcactgccctgaactggccgagatgtctagagtgtccatccgcatcctggatgaactggtgctgccattccaggagctgcagattgacgataacgaatacgcttacctgaaagcaatcatctttttcgaccccgacgccaagggactgagcgatcctggcaaaattaagcggctgagggcacaggtccaggtgtcactggaggactatatcaatgacagacagtacgatagtcgagggcggtttggagaactgctgctgctgctgccaaccctgcagtctattacatggcagatgatcgagcagatccagttcattaaactgttcggcatggctaagatcgacaacctgctgcaggagatgctgctgggaggggcaccctccgatgcccctcatgctcaccacccactgcatccccacctgatgcaggaacatatgggcaccaatgtgatcgtcgcaaacactatgcctacacacctgagcaatggacagatgtgtgagtggccacgccccaggggccaggccgctgcacctgaagccccacagcccgctcctccagggggaagcggctccgagccctacaagctgctgcctggagcagtggccaccattgtgagaccactgtcagcaatcccccagcctactattaccaaacaggaagtcatctgaggactagtccctgttcccagagcccacttttttttctttttttgaaataaaatagcctgtctttcagatctaaaaaaaaaaaaaaaaaaaaaaaaaaaaaaaaaaaaaaaaaaaaaaaaaaaaaaaaaaaaaaaaaaaaaaaaaaaaaaaaaaaaaaaaaaaaaaaaaaaa

SEQ ID NO: 5501 - RNA, 1562 nt, synthetic construct
  misc_feature 1..1562: note = mRNA a-1 (A100) (opt28) from Homo sapiens__NP_000448.3__HNF4A(39-474)(S87A_S142A_S143A_S148A_ T166A_S167A_S313A_S378A_T429A_T432A_S436A_K458R)
  source 1..1562: mol_type = other RNA
aggagagtcccgcagtcggcgtccagcggctctgcttgttcgtgtgtgtgtcgttgcaggccttattcaagcttaccatggacacatctccctcagagggcactaacctgaatgcccctaacagtctgggggtgagcgctctgtgcgcaatctgcggagacagggccaccggcaaacactacggggcttcctcttgtgatggatgcaagggctttttcagacgcgcagtccggaaaaatcatatgtacagctgccgattttcaaggcagtgcgtggtggacaaggacaagagaaaccagtgccgctattgtcggctgaaaaagtgcttcagggccggaatgaaaaaggaagctgtccagaatgagagagatcgaattagtacacggcgcgcagcctacgaagactccgcactgccaagcatcaacgctctgctgcaggccgaggtgctgtctaggcagatcgcagctcccgtgagcgggattaacggcgatatcagagccaagaaaattgcatccatcgctgacgtctgcgaatcaatgaaggagcagctgctggtgctggtggagtgggccaaatacatccctgcattttgcgaactgccactggacgatcaggtcgctctgctgcgggcccacgcaggagagcatctgctgctgggcgccactaagcgaagtatggtgttcaaggacgtgctgctgctggggaatgactatattgtccccaggcactgccctgaactggctgagatgagcagagtgtctatccgcatcctggatgaactggtgctgccattccaggagctgcagattgacgataacgaatacgcatacctgaaagccatcatctttttcgaccccgacgcaaagggactgtccgatcctggcaaaattaagcggctgagggctcaggtccaggtgagcctggaggactatatcaatgacagacagtacgattcacgagggcggtttggagaactgctgctgctgctgccaaccctgcagagtattacatggcagatgatcgagcagatccagttcattaaactgttcggcatggcaaagatcgacaacctgctgcaggagatgctgctgggaggggccccctctgatgctcctcatgcacaccacccactgcatccccacctgatgcaggaacatatgggcaccaatgtgatcgtcgccaacactatgcctacacacctgtccaatggacagatgtgtgagtggccacgccccaggggccaggctgcagcccctgaagctccacagcccgcacctccagggggaagcggcagcgagccctacaagctgctgcctggagccgtggcaaccattgtgagaccactgtccgctatcccccagcctactattaccaaacaggaagtcatctgaggactagtccctgttcccagagcccacttttttttctttttttgaaataaaatagcctgtctttcagatctaaaaaaaaaaaaaaaaaaaaaaaaaaaaaaaaaaaaaaaaaaaaaaaaaaaaaaaaaaaaaaaaaaaaaaaaaaaaaaaaaaaaaaaaaaaaaaaaaaaa

SEQ ID NO: 5502 - RNA, 1562 nt, synthetic construct
  misc_feature 1..1562: note = mRNA a-1 (A100) (opt28) from Homo sapiens__NP_000448.3__HNF4A(39-474)(S87A_K106R_K108R_K126R_ K127R_S142A_S143A_S148A_T166A_S167A_S313A_S378A_T429A_T432A _S436A_K458R)
  source 1..1562: mol_type = other RNA
aggagagtcccgcagtcggcgtccagcggctctgcttgttcgtgtgtgtgtcgttgcaggccttattcaagcttaccatggacacatctccctcagagggcactaacctgaatgcccctaacagtctgggggtgagcgctctgtgcgcaatctgcggagacagggccaccggcaaacactacggggcttcctcttgtgatggatgcaagggctttttcagacgcgcagtccggaaaaatcatatgtacagctgccgattttcaaggcagtgcgtggtggacagagaccgccggaaccagtgcaggtattgtagactgaagaagtgcttccgagccggaatgcggcgcgaagctgtccagaatgagagggatagaattagtacacggcgagcagcctacgaagactccgcactgccaagcatcaacgctctgctgcaggccgaggtgctgtctaggcagatcgcagctcccgtgagcgggattaacggcgatatcagagccaaaaagattgcatccatcgctgacgtctgcgaatcaatgaaagagcagctgctggtgctggtggagtgggccaagtacatccctgcattttgcgaactgccactggacgatcaggtcgctctgctgcgcgcccacgcaggagagcatctgctgctgggcgccactaagcggagtatggtgttcaaagacgtgctgctgctggggaatgactatattgtccccaggcactgccctgaactggctgagatgagcagagtgtctatccgaatcctggatgaactggtgctgccattccaggagctgcagattgacgataacgaatacgcatacctgaaggccatcatctttttcgaccccgacgcaaaaggactgtccgatcctggcaagattaagcggctgcgcgctcaggtccaggtgagcctggaggactatatcaatgacaggcagtacgattcaagagggcggtttggagaactgctgctgctgctgccaaccctgcagagtattacatggcagatgatcgagcagatccagttcattaaactgttcggcatggcaaagatcgacaacctgctgcaggagatgctgctgggaggggccccctctgatgctcctcatgcacaccacccactgcatccccacctgatgcaggaacatatgggcaccaatgtgatcgtcgccaacactatgcctacacacctgtccaatggacagatgtgtgagtggccacgccccaggggccaggctgcagcccctgaagctccacagcccgcacctccagggggaagcggcagcgagccctacaaactgctgcctggagccgtggcaaccattgtgagaccactgtccgctatcccccagcctactattaccaagcaggaagtcatctgaggactagtccctgttcccagagcccacttttttttctttttttgaaataaaatagcctgtctttcagatctaaaaaaaaaaaaaaaaaaaaaaaaaaaaaaaaaaaaaaaaaaaaaaaaaaaaaaaaaaaaaaaaaaaaaaaaaaaaaaaaaaaaaaaaaaaaaaaaaaaa

SEQ ID NO: 5503 - RNA, 1562 nt, synthetic construct
  misc_feature 1..1562: note = mRNA a-1 (A100) (opt28) from Homo sapiens__NP_000448.3__HNF4A(39-474)(S87A_K106R_K108R_K126R_ K127R)
  source 1..1562: mol_type = other RNA
aggagagtcccgcagtcggcgtccagcggctctgcttgttcgtgtgtgtgtcgttgcaggccttattcaagcttaccatggacacatctccctcagagggcactaacctgaatgcccctaacagtctgggggtgagcgctctgtgcgcaatctgcggagacagggccaccggcaaacactacggggcttcctcttgtgatggatgcaagggctttttcagacgcgcagtccggaaaaatcatatgtacagctgccgattttcaaggcagtgcgtggtggacagagaccgccggaaccagtgcaggtattgtagactgaagaagtgcttccgagccggaatgcggcgcgaagctgtccagaatgagagggatagaattagtacacggcgatccagctacgaagactctagcctgccatccatcaacgcactgctgcaggccgaggtgctgtcaaggcagatcaccagtcccgtgagcgggattaacggcgatatcagagctaaaaagattgcatctatcgccgacgtctgcgaatccatgaaagagcagctgctggtgctggtggagtgggcaaagtacatccctgctttttgcgaactgccactggacgatcaggtcgccctgctgcgcgcacacgctggagagcatctgctgctgggcgccactaagcggagcatggtgttcaaagacgtgctgctgctggggaatgactatattgtccccaggcactgccctgaactggcagagatgtcaagagtgagtatccgaatcctggatgaactggtgctgccattccaggagctgcagattgacgataacgaatacgcttacctgaaggccatcatctttttcgaccccgacgcaaaaggactgtctgatcctggcaagattaagcggctgcgctcccaggtccaggtgagcctggaggactatatcaatgacaggcagtacgatagcagagggcggtttggagaactgctgctgctgctgccaacactgcagtccattacctggcagatgatcgagcagatccagttcattaaactgttcggcatggccaagatcgacaacctgctgcaggagatgctgctgggagggtcaccctctgatgctcctcatgcacaccacccactgcatccccacctgatgcaggaacatatgggcactaatgtgatcgtcgccaacacaatgcctacccacctgagtaatggacagatgtgtgagtggccacgccccaggggccaggcagctactcctgaaaccccacagcccagccctccagggggatccggctctgagccctacaaactgctgcctggagcagtggccacaattgtgaagccactgagcgctatcccccagcctaccattactaaacaggaagtcatctgaggactagtccctgttcccagagcccacttttttttctttttttgaaataaaatagcctgtctttcagatctaaaaaaaaaaaaaaaaaaaaaaaaaaaaaaaaaaaaaaaaaaaaaaaaaaaaaaaaaaaaaaaaaaaaaaaaaaaaaaaaaaaaaaaaaaaaaaaaaaaa

SEQ ID NO: 5504 - RNA, 1562 nt, synthetic construct
  misc_feature 1..1562: note = mRNA a-1 (A100) (opt28) from Homo sapiens__NP_000448.3__HNF4A(39-474)(S87A_K106R_K108R_K126R_ K127R_S142A_S143A_S148A_T166A_S167A_S313A_S378A_T429A_T432A _S436A_K458R_S461A)
  source 1..1562: mol_type = other RNA
aggagagtcccgcagtcggcgtccagcggctctgcttgttcgtgtgtgtgtcgttgcaggccttattcaagcttaccatggacacatctccctcagagggcactaacctgaatgcccctaacagtctgggggtgagcgctctgtgcgcaatctgcggagacagggccaccggcaaacactacggggcttcctcttgtgatggatgcaagggctttttcagacgcgcagtccggaaaaatcatatgtacagctgccgattttcaaggcagtgcgtggtggacagagaccgccggaaccagtgcaggtattgtagactgaagaagtgcttccgagccggaatgcggcgcgaagctgtccagaatgagagggatagaattagtacacggcgagcagcctacgaagactccgcactgccaagcatcaacgctctgctgcaggccgaggtgctgtctaggcagatcgcagctcccgtgagcgggattaacggcgatatcagagccaaaaagattgcatccatcgctgacgtctgcgaatcaatgaaagagcagctgctggtgctggtggagtgggccaagtacatccctgcattttgcgaactgccactggacgatcaggtcgctctgctgcgcgcccacgcaggagagcatctgctgctgggcgccactaagcggagtatggtgttcaaagacgtgctgctgctggggaatgactatattgtccccaggcactgccctgaactggctgagatgagcagagtgtctatccgaatcctggatgaactggtgctgccattccaggagctgcagattgacgataacgaatacgcatacctgaaggccatcatctttttcgaccccgacgcaaaaggactgtccgatcctggcaagattaagcggctgcgcgctcaggtccaggtgagcctggaggactatatcaatgacaggcagtacgattcaagagggcggtttggagaactgctgctgctgctgccaaccctgcagagtattacatggcagatgatcgagcagatccagttcattaaactgttcggcatggcaaagatcgacaacctgctgcaggagatgctgctgggaggggccccctctgatgctcctcatgcacaccacccactgcatccccacctgatgcaggaacatatgggcaccaatgtgatcgtcgccaacactatgcctacacacctgtccaatggacagatgtgtgagtggccacgccccaggggccaggctgcagcccctgaagctccacagcccgcacctccagggggaagcggcagcgagccctacaaactgctgcctggagccgtggcaaccattgtgagaccactggctgccatcccccagcctactattaccaagcaggaagtcatctgaggactagtccctgttcccagagcccacttttttttctttttttgaaataaaatagcctgtctttcagatctaaaaaaaaaaaaaaaaaaaaaaaaaaaaaaaaaaaaaaaaaaaaaaaaaaaaaaaaaaaaaaaaaaaaaaaaaaaaaaaaaaaaaaaaaaaaaaaaaaaa

SEQ ID NO: 5505 - RNA, 1562 nt, synthetic construct
  misc_feature 1..1562: note = mRNA a-1 (A100) (opt28) from Homo sapiens__NP_000448.3__HNF4A(39-474)(S87A_K106R_K108R_K126R_ K127R_S142A_S143A_S148A_T166A_S167A_S313A_S378A_T429A_T432A _S436A_K458R_S461E)
  source 1..1562: mol_type = other RNA
aggagagtcccgcagtcggcgtccagcggctctgcttgttcgtgtgtgtgtcgttgcaggccttattcaagcttaccatggacacatctccctcagagggcactaacctgaatgcccctaacagtctgggggtgagcgctctgtgcgcaatctgcggagacagggccaccggcaaacactacggggcttcctcttgtgatggatgcaagggctttttcagacgcgcagtccggaaaaatcatatgtacagctgccgattttcaaggcagtgcgtggtggacagagaccgccggaaccagtgcaggtattgtagactgaagaagtgcttccgagccggaatgcggcgcgaagctgtccagaatgagagggatagaattagtacacggcgagcagcctacgaagactccgcactgccaagcatcaacgctctgctgcaggccgaggtgctgtctaggcagatcgcagctcccgtgagcgggattaacggcgatatcagagccaaaaagattgcatccatcgctgacgtctgcgaatcaatgaaagagcagctgctggtgctggtggagtgggccaagtacatccctgcattttgcgaactgccactggacgatcaggtcgctctgctgcgcgcccacgcaggagagcatctgctgctgggcgccactaagcggagtatggtgttcaaagacgtgctgctgctggggaatgactatattgtccccaggcactgccctgaactggctgagatgagcagagtgtctatccgaatcctggatgaactggtgctgccattccaggagctgcagattgacgataacgaatacgcatacctgaaggccatcatctttttcgaccccgacgcaaaaggactgtccgatcctggcaagattaagcggctgcgcgctcaggtccaggtgagcctggaggactatatcaatgacaggcagtacgattcaagagggcggtttggagaactgctgctgctgctgccaaccctgcagagtattacatggcagatgatcgagcagatccagttcattaaactgttcggcatggcaaagatcgacaacctgctgcaggagatgctgctgggaggggccccctctgatgctcctcatgcacaccacccactgcatccccacctgatgcaggaacatatgggcaccaatgtgatcgtcgccaacactatgcctacacacctgtccaatggacagatgtgtgagtggccacgccccaggggccaggctgcagcccctgaagctccacagcccgcacctccagggggaagcggcagcgagccctacaaactgctgcctggagccgtggcaaccattgtgagaccactggaagctatcccccagcctactattaccaagcaggaggtcatctgaggactagtccctgttcccagagcccacttttttttctttttttgaaataaaatagcctgtctttcagatctaaaaaaaaaaaaaaaaaaaaaaaaaaaaaaaaaaaaaaaaaaaaaaaaaaaaaaaaaaaaaaaaaaaaaaaaaaaaaaaaaaaaaaaaaaaaaaaaaaaa

SEQ ID NO: 5506 - RNA, 1562 nt, synthetic construct
  misc_feature 1..1562: note = mRNA a-1 (A100) (opt28) from Homo sapiens__NP_000448.3__HNF4A(39-474)(S87A_K106R_K108R_K126R_ K127R_S142A_S143A_S148E_T166A_S167E_S313A_S378E_T429E_T432E _S436E_K458R_S461E)
  source 1..1562: mol_type = other RNA
aggagagtcccgcagtcggcgtccagcggctctgcttgttcgtgtgtgtgtcgttgcaggccttattcaagcttaccatggacacatctccctcagagggcactaacctgaatgcccctaacagtctgggggtgagcgctctgtgcgcaatctgcggagacagggccaccggcaaacactacggggcttcctcttgtgatggatgcaagggctttttcagacgcgcagtccggaaaaatcatatgtacagctgccgattttcaaggcagtgcgtggtggacagagaccgccggaaccagtgcaggtattgtagactgaagaagtgcttccgagccggaatgcggcgcgaagctgtccagaatgagagggatagaattagtacacggcgagcagcctacgaagactccgagctgccaagcatcaacgcactgctgcaggctgaagtgctgtctaggcagatcgccgagcccgtgagcgggattaacggcgatatcagagctaaaaagattgcatccatcgccgacgtctgcgagtcaatgaaagaacagctgctggtgctggtggagtgggcaaagtacatccctgctttttgcgaactgccactggacgatcaggtcgccctgctgcgcgcacacgctggagagcatctgctgctgggcgccactaagcggagtatggtgttcaaagacgtgctgctgctggggaatgactatattgtccccaggcactgccctgaactggcagagatgagcagagtgtctatccgaatcctggatgaactggtgctgccattccaggagctgcagattgacgataacgaatacgcctacctgaaggctatcatctttttcgaccccgacgcaaaaggactgtccgatcctggcaagattaagcggctgcgcgcccaggtccaggtgagcctggaggactatatcaatgacaggcagtacgattcaagagggcggtttggagagctgctgctgctgctgccaaccctgcagagtattacatggcagatgatcgaacagatccagttcattaaactgttcggcatggcaaagatcgacaacctgctgcaggagatgctgctgggaggggaaccctctgatgctcctcatgcacaccacccactgcatccccacctgatgcaggagcatatgggcaccaatgtgatcgtcgccaacactatgcctacacacctgtccaatggacagatgtgtgaatggccacgccccaggggccaggctgcagagcctgaggaaccacagcccgagcctccagggggaagcggcagcgaaccctacaaactgctgcctggagccgtggctaccattgtgagaccactggaggcaatcccccagcctactattaccaagcaggaagtcatctgaggactagtccctgttcccagagcccacttttttttctttttttgaaataaaatagcctgtctttcagatctaaaaaaaaaaaaaaaaaaaaaaaaaaaaaaaaaaaaaaaaaaaaaaaaaaaaaaaaaaaaaaaaaaaaaaaaaaaaaaaaaaaaaaaaaaaaaaaaaaaa

SEQ ID NO: 5507 - RNA, 1562 nt, synthetic construct
  misc_feature 1..1562: note = mRNA a-1 (A100) (opt28) from Homo sapiens__NP_000448.3__HNF4A(39-474)(S87A_K106R_K108R_K126R_ K127R_S142A_S143A_S148A_T166A_S167A_K179R_K180R_S313A_S378A _T429A_T432A_S436A_K458R_S461E)
  source 1..1562: mol_type = other RNA
aggagagtcccgcagtcggcgtccagcggctctgcttgttcgtgtgtgtgtcgttgcaggccttattcaagcttaccatggacacatctccctcagagggcactaacctgaatgcccctaacagtctgggggtgagcgctctgtgcgcaatctgcggagacagggccaccggcaaacactacggggcttcctcttgtgatggatgcaagggctttttcagacgcgcagtccggaaaaatcatatgtacagctgccgattttcaaggcagtgcgtggtggacagagaccgccggaaccagtgcaggtattgtagactgaagaagtgcttccgagccggaatgcggcgcgaagctgtccagaatgagagggatagaattagtacacggcgagcagcctacgaagactccgcactgccaagcatcaacgctctgctgcaggccgaggtgctgtctaggcagatcgcagctcccgtgagcgggattaacggcgatatcagagcccgccggattgcatccatcgctgacgtctgcgaatcaatgaaagagcagctgctggtgctggtggagtgggccaagtacatccctgcattttgcgaactgccactggacgatcaggtcgctctgctgagggcccacgcaggagagcatctgctgctgggcgccactaaaagaagtatggtgttcaaggacgtgctgctgctggggaatgactatattgtcccccgacactgccctgaactggctgagatgagccgggtgtctatccgcatcctggatgaactggtgctgccattccaggagctgcagattgacgataacgaatacgcatacctgaaggccatcatctttttcgaccccgacgcaaaaggactgtccgatcctggcaagattaaaaggctgagagctcaggtccaggtgagcctggaggactatatcaatgaccggcagtacgattcacgcgggaggtttggagaactgctgctgctgctgccaaccctgcagagtattacatggcagatgatcgagcagatccagttcattaagctgttcggcatggcaaagatcgacaacctgctgcaggagatgctgctgggaggggccccctctgatgctcctcatgcacaccacccactgcatccccacctgatgcaggaacatatgggcaccaatgtgatcgtcgccaacactatgcctacacacctgtccaatggacagatgtgtgagtggccaagaccccgaggccaggctgcagcccctgaagctccacagcccgcacctccagggggaagcggcagcgagccctacaaactgctgcctggagccgtggcaaccattgtgcggccactggaagctatcccccagcctactattaccaagcaggaggtcatctgaggactagtccctgttcccagagcccacttttttttctttttttgaaataaaatagcctgtctttcagatctaaaaaaaaaaaaaaaaaaaaaaaaaaaaaaaaaaaaaaaaaaaaaaaaaaaaaaaaaaaaaaaaaaaaaaaaaaaaaaaaaaaaaaaaaaaaaaaaaaaa

SEQ ID NO: 5508 - RNA, 1562 nt, synthetic construct
  misc_feature 1..1562: note = mRNA a-1 (A100) (opt28) from Homo sapiens__NP_000448.3__HNF4A(39-474)(S87A_K106R_K108R_K126R_ K127R_S142A_S143A_S148A_T166A_S167A_K300R_K307R_K309R_S313A _S378A_T429A_T432A_S436A_K458R_S461E)
  source 1..1562: mol_type = other RNA
aggagagtcccgcagtcggcgtccagcggctctgcttgttcgtgtgtgtgtcgttgcaggccttattcaagcttaccatggacacatctccctcagagggcactaacctgaatgcccctaacagtctgggggtgagcgctctgtgcgcaatctgcggagacagggccaccggcaaacactacggggcttcctcttgtgatggatgcaagggctttttcagacgcgcagtccggaaaaatcatatgtacagctgccgattttcaaggcagtgcgtggtggacagagaccgccggaaccagtgcaggtattgtagactgaagaagtgcttccgagccggaatgcggcgcgaagctgtccagaatgagagggatagaattagtacacggcgagcagcctacgaagactccgcactgccaagcatcaacgctctgctgcaggccgaggtgctgtctaggcagatcgcagctcccgtgagcgggattaacggcgatatcagagccaaaaagattgcatccatcgctgacgtctgcgaatcaatgaaagagcagctgctggtgctggtggagtgggccaagtacatccctgcattttgcgaactgccactggacgatcaggtcgctctgctgcgcgcccacgcaggagagcatctgctgctgggcgccactaagcggagtatggtgttcaaagacgtgctgctgctggggaatgactatattgtccccaggcactgccctgaactggctgagatgagcagagtgtctatccgaatcctggatgaactggtgctgccattccaggagctgcagattgacgataacgaatacgcatacctgaaggccatcatctttttcgaccccgacgcacggggactgtccgatcctggccgcattaggagactgcgggctcaggtccaggtgagcctggaggactatatcaatgaccgccagtacgattcaagggggagatttggagaactgctgctgctgctgccaaccctgcagagtattacatggcagatgatcgagcagatccagttcattaaactgttcggcatggcaaagatcgacaacctgctgcaggagatgctgctgggaggggccccctctgatgctcctcatgcacaccacccactgcatccccacctgatgcaggaacatatgggcaccaatgtgatcgtcgccaacactatgcctacacacctgtccaatggacagatgtgtgagtggccacgaccccggggccaggctgcagcccctgaagctccacagcccgcacctccagggggaagcggcagcgagccctacaagctgctgcctggagccgtggcaaccattgtgaggccactggaagctatcccccagcctactattaccaaacaggaggtcatctgaggactagtccctgttcccagagcccacttttttttctttttttgaaataaaatagcctgtctttcagatctaaaaaaaaaaaaaaaaaaaaaaaaaaaaaaaaaaaaaaaaaaaaaaaaaaaaaaaaaaaaaaaaaaaaaaaaaaaaaaaaaaaaaaaaaaaaaaaaaaaa

SEQ ID NO: 5509 - RNA, 1562 nt, synthetic construct
  misc_feature 1..1562: note = mRNA a-1 (A100) (opt28) from Homo sapiens__NP_000448.3__HNF4A(39-474)(S87A_K106R_K108R_K126R_ K127R_S142A_S143A_S148A_T166A_S167A_S313A_S378A_T429A_T432A _S436A_K447R_K458R_S461E_K470R)
  source 1..1562: mol_type = other RNA
aggagagtcccgcagtcggcgtccagcggctctgcttgttcgtgtgtgtgtcgttgcaggccttattcaagcttaccatggacacatctccctcagagggcactaacctgaatgcccctaacagtctgggggtgagcgctctgtgcgcaatctgcggagacagggccaccggcaaacactacggggcttcctcttgtgatggatgcaagggctttttcagacgcgcagtccggaaaaatcatatgtacagctgccgattttcaaggcagtgcgtggtggacagagaccgccggaaccagtgcaggtattgtagactgaagaagtgcttccgagccggaatgcggcgcgaagctgtccagaatgagagggatagaattagtacacggcgagcagcctacgaagactccgcactgccaagcatcaacgctctgctgcaggccgaggtgctgtctaggcagatcgcagctcccgtgagcgggattaacggcgatatcagagccaaaaagattgcatccatcgctgacgtctgcgaatcaatgaaagagcagctgctggtgctggtggagtgggccaagtacatccctgcattttgcgaactgccactggacgatcaggtcgctctgctgcgcgcccacgcaggagagcatctgctgctgggcgccactaagcggagtatggtgttcaaagacgtgctgctgctggggaatgactatattgtccccaggcactgccctgaactggctgagatgagcagagtgtctatccgaatcctggatgaactggtgctgccattccaggagctgcagattgacgataacgaatacgcatacctgaaggccatcatctttttcgaccccgacgcaaaaggactgtccgatcctggcaagattaagcggctgcgcgctcaggtccaggtgagcctggaggactatatcaatgacaggcagtacgattcaagagggcggtttggagaactgctgctgctgctgccaaccctgcagagtattacatggcagatgatcgagcagatccagttcattaaactgttcggcatggcaaagatcgacaacctgctgcaggagatgctgctgggaggggccccctctgatgctcctcatgcacaccacccactgcatccccacctgatgcaggaacatatgggcaccaatgtgatcgtcgccaacactatgcctacacacctgtccaatggacagatgtgtgagtggccacgccccaggggccaggctgcagcccctgaagctccacagcccgcacctccagggggaagcggcagcgagccctacagactgctgcctggagccgtggcaaccattgtgcgaccactggaagctatcccccagcctactattacccggcaggaggtcatctgaggactagtccctgttcccagagcccacttttttttctttttttgaaataaaatagcctgtctttcagatctaaaaaaaaaaaaaaaaaaaaaaaaaaaaaaaaaaaaaaaaaaaaaaaaaaaaaaaaaaaaaaaaaaaaaaaaaaaaaaaaaaaaaaaaaaaaaaaaaaaa

SEQ ID NO: 5510 - RNA, 1562 nt, synthetic construct
  misc_feature 1..1562: note = mRNA a-1 (A100) (opt28) from Homo sapiens__NP_000448.3__HNF4A(39-474)(S87A_K106R_K108R_K126R_ K127R_S142A_S143A_S148A_T166A_S167A_K179R_K180R_K234R_K300R _K307R_K309R_S313A_S378A_T429A_T432A_S436A_K447R_K458R_S461 E_K470R)
  source 1..1562: mol_type = other RNA
aggagagtcccgcagtcggcgtccagcggctctgcttgttcgtgtgtgtgtcgttgcaggccttattcaagcttaccatggacacatctccctcagagggcactaacctgaatgcccctaacagtctgggggtgagcgctctgtgcgcaatctgcggagacagggccaccggcaaacactacggggcttcctcttgtgatggatgcaagggctttttcagacgcgcagtccggaaaaatcatatgtacagctgccgattttcaaggcagtgcgtggtggacagagaccgccggaaccagtgcaggtattgtagactgaagaagtgcttccgagccggaatgcggcgcgaagctgtccagaatgagagggatagaattagtacacggcgagcagcctacgaagactccgcactgccaagcatcaacgctctgctgcaggccgaggtgctgtctaggcagatcgcagctcccgtgagcgggattaacggcgatatcagagcccgccggattgcatccatcgctgacgtctgcgaatcaatgaaagagcagctgctggtgctggtggagtgggccaagtacatccctgcattttgcgaactgccactggacgatcaggtcgctctgctgagggcccacgcaggagagcatctgctgctgggcgccactagacgaagtatggtgttcaaagacgtgctgctgctggggaatgactatattgtcccccggcactgccctgaactggctgagatgagccgcgtgtctatcaggatcctggatgaactggtgctgccattccaggagctgcagattgacgataacgaatacgcatacctgaaggccatcatctttttcgaccccgacgcaagaggactgtccgatcctggccggattcgcaggctgagagctcaggtccaggtgagcctggaggactatatcaatgaccgacagtacgattcacgggggaggtttggagaactgctgctgctgctgccaaccctgcagagtattacatggcagatgatcgagcagatccagttcattaagctgttcggcatggcaaaaatcgacaacctgctgcaggagatgctgctgggaggggccccctctgatgctcctcatgcacaccacccactgcatccccacctgatgcaggaacatatgggcaccaatgtgatcgtcgccaacactatgcctacacacctgtccaatggacagatgtgtgagtggccaagaccccgcggccaggctgcagcccctgaagctccacagcccgcacctccagggggaagcggcagcgagccctaccggctgctgcctggagccgtggcaaccattgtgcgaccactggaagctatcccccagcctactattaccaggcaggaggtcatctgaggactagtccctgttcccagagcccacttttttttctttttttgaaataaaatagcctgtctttcagatctaaaaaaaaaaaaaaaaaaaaaaaaaaaaaaaaaaaaaaaaaaaaaaaaaaaaaaaaaaaaaaaaaaaaaaaaaaaaaaaaaaaaaaaaaaaaaaaaaaaa

SEQ ID NO: 5511 - RNA, 1562 nt, synthetic construct
  misc_feature 1..1562: note = mRNA a-1 (A100) (opt28) from Homo sapiens__NP_000448.3__HNF4A(39-474)(S87A_S95A_S99A_K106R_K1 08R_K126R_K127R_S142A_S143A_S148A_T166A_S167A_S313A_S378A_T 429A_T432A_S436A_K458R_S461E)
  source 1..1562: mol_type = other RNA
aggagagtcccgcagtcggcgtccagcggctctgcttgttcgtgtgtgtgtcgttgcaggccttattcaagcttaccatggacacatctccctcagagggcactaacctgaatgcccctaacagtctgggggtgagcgctctgtgcgcaatctgcggagacagggccaccggcaaacactacggggcttcctcttgtgatggatgcaagggctttttcagacgcgcagtccggaaaaatcatatgtacgcctgccgatttgctaggcagtgcgtggtggacagagaccgccggaaccagtgcaggtattgtagactgaagaagtgcttccgagcaggaatgcggcgcgaagccgtccagaatgagagggatagaattagcacacggcgagcagcttacgaagactcagccctgccaagtatcaacgcactgctgcaggctgaggtgctgtccaggcagatcgccgcacccgtgagcgggattaacggcgatatcagagctaaaaagattgcctctatcgcagacgtctgcgaaagcatgaaagagcagctgctggtgctggtggagtgggctaagtacatccctgccttttgcgaactgccactggacgatcaggtcgcactgctgcgcgcccacgctggagagcatctgctgctgggcgcaactaagcggtccatggtgttcaaagacgtgctgctgctggggaatgactatattgtccccaggcactgccctgaactggccgagatgtcaagagtgagtatccgaatcctggatgaactggtgctgccattccaggagctgcagattgacgataacgaatacgcatacctgaaggctatcatctttttcgaccccgacgcaaaaggactgagcgatcctggcaagattaagcggctgcgcgcccaggtccaggtgtctctggaggactatatcaatgacaggcagtacgattccagagggcggtttggagaactgctgctgctgctgccaaccctgcagagcattacatggcagatgatcgagcagatccagttcattaaactgttcggcatggctaagatcgacaacctgctgcaggagatgctgctgggaggggcaccctcagatgcccctcatgctcaccacccactgcatccccacctgatgcaggaacatatgggcaccaatgtgatcgtcgcaaacactatgcctacacacctgagtaatggacagatgtgtgagtggccacgccccaggggccaggccgctgcacctgaagccccacagcccgcacctccagggggatctggctccgagccctacaaactgctgcctggagctgtggccaccattgtgagaccactggaagcaatcccccagcctactattaccaagcaggaggtcatctgaggactagtccctgttcccagagcccacttttttttctttttttgaaataaaatagcctgtctttcagatctaaaaaaaaaaaaaaaaaaaaaaaaaaaaaaaaaaaaaaaaaaaaaaaaaaaaaaaaaaaaaaaaaaaaaaaaaaaaaaaaaaaaaaaaaaaaaaaaaaaa

SEQ ID NO: 5512 - RNA, 1562 nt, synthetic construct
  misc_feature 1..1562: note = mRNA a-1 (A100) (opt28) from Homo sapiens__NP_000448.3__HNF4A(39-474)(S87A_K106R_K108R_K126R_ K127R_S138A_T139A_S142A_S143A_S148A_T166A_S167A_S313A_S378A _T429A_T432A_S436A_K458R_S461E)
  source 1..1562: mol_type = other RNA
aggagagtcccgcagtcggcgtccagcggctctgcttgttcgtgtgtgtgtcgttgcaggccttattcaagcttaccatggacacatctccctcagagggcactaacctgaatgcccctaacagtctgggggtgagcgctctgtgcgcaatctgcggagacagggccaccggcaaacactacggggcttcctcttgtgatggatgcaagggctttttcagacgcgcagtccggaaaaatcatatgtacagctgccgattttcaaggcagtgcgtggtggacagagaccgccggaaccagtgcaggtattgtagactgaagaagtgcttccgagccggaatgcggcgcgaagctgtccagaatgagagggatagaattgcagcccggcgagcagcttacgaagacagtgccctgccatccatcaacgcactgctgcaggctgaggtgctgagcaggcagatcgccgcacccgtgtctgggattaacggcgatatcagagctaaaaagattgccagcatcgcagacgtctgcgaatccatgaaagagcagctgctggtgctggtggagtgggctaagtacatccctgccttttgcgaactgccactggacgatcaggtcgcactgctgcgcgcccacgctggagagcatctgctgctgggcgcaacaaagcggtcaatggtgttcaaagacgtgctgctgctggggaatgactatattgtccccaggcactgccctgaactggccgagatgagtagagtgagcatccgaatcctggatgaactggtgctgccattccaggagctgcagattgacgataacgaatacgcatacctgaaggctatcatctttttcgaccccgacgcaaaaggactgtctgatcctggcaagattaagcggctgcgcgcccaggtccaggtgtccctggaggactatatcaatgacaggcagtacgatagcagagggcggtttggagaactgctgctgctgctgccaactctgcagtcaattacctggcagatgatcgagcagatccagttcattaaactgttcggcatggctaagatcgacaacctgctgcaggagatgctgctgggaggggcacccagtgatgcccctcatgctcaccacccactgcatccccacctgatgcaggaacatatgggcacaaatgtgatcgtcgcaaacaccatgcctactcacctgtctaatggacagatgtgtgagtggccacgccccaggggccaggccgctgcacctgaagccccacagcccgcacctccagggggatccggcagcgagccctacaaactgctgcctggagctgtggccacaattgtgagaccactggaagcaatcccccagcctaccattactaagcaggaggtcatctgaggactagtccctgttcccagagcccacttttttttctttttttgaaataaaatagcctgtctttcagatctaaaaaaaaaaaaaaaaaaaaaaaaaaaaaaaaaaaaaaaaaaaaaaaaaaaaaaaaaaaaaaaaaaaaaaaaaaaaaaaaaaaaaaaaaaaaaaaaaaaa

SEQ ID NO: 5513 - RNA, 1562 nt, synthetic construct
  misc_feature 1..1562: note = mRNA a-1 (A100) (opt28) from Homo sapiens__NP_000448.3__HNF4A(39-474)(S87A_S95A_S99A_K106R_K1 08R_K126R_K127R_S138A_T139A_S142A_S143A_S148A_T166A_S167A_S 313A_S378A_T429A_T432A_S436A_K458R_S461E)
  source 1..1562: mol_type = other RNA
aggagagtcccgcagtcggcgtccagcggctctgcttgttcgtgtgtgtgtcgttgcaggccttattcaagcttaccatggacacatctccctcagagggcactaacctgaatgcccctaacagtctgggggtgagcgctctgtgcgcaatctgcggagacagggccaccggcaaacactacggggcttcctcttgtgatggatgcaagggctttttcagacgcgcagtccggaaaaatcatatgtacgcctgccgatttgctaggcagtgcgtggtggacagagaccgccggaaccagtgcaggtattgtagactgaagaagtgcttccgagcaggaatgcggcgcgaagccgtccagaatgagagggatagaattgcagctcggcgagccgcatacgaagacagcgctctgccatcaatcaacgccctgctgcaggcagaggtgctgagtaggcagatcgctgcccccgtgtccgggattaacggcgatatcagagctaaaaagattgcaagcatcgccgacgtctgcgaatctatgaaagagcagctgctggtgctggtggagtgggcaaagtacatccctgccttttgcgaactgccactggacgatcaggtcgctctgctgcgcgcacacgccggagagcatctgctgctgggcgcaacaaagcggagcatggtgttcaaagacgtgctgctgctggggaatgactatattgtccccaggcactgccctgaactggctgagatgtccagagtgtcaatccgaatcctggatgaactggtgctgccattccaggagctgcagattgacgataacgaatacgcatacctgaaggccatcatctttttcgaccccgacgctaaaggactgagtgatcctggcaagattaagcggctgcgcgcacaggtccaggtgagcctggaggactatatcaatgacaggcagtacgattctagagggcggtttggagaactgctgctgctgctgccaactctgcagtccattacctggcagatgatcgagcagatccagttcattaaactgttcggcatggccaagatcgacaacctgctgcaggagatgctgctgggaggggctcccagcgatgcacctcatgcccaccacccactgcatccccacctgatgcaggaacatatgggcacaaatgtgatcgtcgctaacaccatgcctactcacctgtcaaatggacagatgtgtgagtggccacgccccaggggccaggcagccgcacctgaagctccacagcccgcccctccagggggaagtggctctgagccctacaaactgctgcctggagcagtggctacaattgtgagaccactggaagccatcccccagcctaccattactaagcaggaggtcatctgaggactagtccctgttcccagagcccacttttttttctttttttgaaataaaatagcctgtctttcagatctaaaaaaaaaaaaaaaaaaaaaaaaaaaaaaaaaaaaaaaaaaaaaaaaaaaaaaaaaaaaaaaaaaaaaaaaaaaaaaaaaaaaaaaaaaaaaaaaaaaa

SEQ ID NO: 5514 - RNA, 1562 nt, synthetic construct
  misc_feature 1..1562: note = mRNA a-1 (A100) (opt29) from Homo sapiens__NP_000448.3__HNF4A(39-474)
  source 1..1562: mol_type = other RNA
aggagagtcccgcagtcggcgtccagcggctctgcttgttcgtgtgtgtgtcgttgcaggccttattcaagcttaccatggacaccagccctagcgagggcaccaacctgaacgcccctaatagcctgggagtgtccgccctgtgtgccatctgtggcgatagagccaccggcaagcactacggcgccagctcttgtgatggctgcaagggcttcttccggcggagcgtgcggaagaaccacatgtacagctgccggttcagccggcagtgcgtggtggacaaggataagcggaaccagtgccggtactgcagactgaagaagtgcttcagagccggcatgaagaaagaagccgtgcagaacgagcgggaccggatcagcaccagaagaagcagctacgaggacagcagcctgcccagcatcaacgccctgctgcaggccgaggtgctgagcagacagatcaccagcccagtgtccggcatcaacggcgacatccgggccaagaagatcgccagcattgccgacgtgtgcgagagcatgaaggaacagctgctggtgctggtggaatgggccaagtacatccccgccttttgcgagctgcccctggacgatcaggtggccctgctgagagcacacgccggcgaacatctgctgctgggagccaccaagcggagcatggtgttcaaggacgtgctgctgctgggcaacgactacatcgtgcccagacactgccctgagctggccgagatgagccgggtgtccatcagaatcctggacgaactggtgctgccgtttcaggaactgcagatcgacgacaacgagtacgcctacctgaaggccatcatctttttcgaccccgacgccaagggcctgagcgaccctggcaagatcaagcggctgagaagccaggtgcaagtgtccctggaagattacatcaacgaccggcagtacgacagccggggcagatttggcgaactgctcctgctgctgcccaccctgcagagcatcacctggcagatgatcgagcagatccagttcatcaagctgttcggcatggccaagatcgacaatctgctgcaggaaatgctgctcgggggcagcccttctgatgcccctcatgcccaccaccctctgcaccctcacctgatgcaagaacacatgggcaccaatgtgatcgtggccaacacaatgcccacccacctgagcaacggccagatgtgcgagtggcccagacctagaggacaggccgccacacctgagacacctcagccttctccacctggcggctctggcagcgagccttacaaactgctgcctggcgctgtggccaccatcgtgaaacctctgagcgccatcccccagcccaccatcaccaagcaggaagtgatctgaggactagtccctgttcccagagcccacttttttttctttttttgaaataaaatagcctgtctttcagatctaaaaaaaaaaaaaaaaaaaaaaaaaaaaaaaaaaaaaaaaaaaaaaaaaaaaaaaaaaaaaaaaaaaaaaaaaaaaaaaaaaaaaaaaaaaaaaaaaaaa

SEQ ID NO: 5515 - RNA, 1562 nt, synthetic construct
  misc_feature 1..1562: note = mRNA a-1 (A100) (opt29) from Homo sapiens__NP_000448.3__HNF4A(39-474)(S313A)
  source 1..1562: mol_type = other RNA
aggagagtcccgcagtcggcgtccagcggctctgcttgttcgtgtgtgtgtcgttgcaggccttattcaagcttaccatggacaccagccctagcgagggcaccaacctgaacgcccctaatagcctgggagtgtccgccctgtgtgccatctgtggcgatagagccaccggcaagcactacggcgccagctcttgtgatggctgcaagggcttcttccggcggagcgtgcggaagaaccacatgtacagctgccggttcagccggcagtgcgtggtggacaaggataagcggaaccagtgccggtactgcagactgaagaagtgcttcagagccggcatgaagaaagaagccgtgcagaacgagcgggaccggatcagcaccagaagaagcagctacgaggacagcagcctgcccagcatcaacgccctgctgcaggccgaggtgctgagcagacagatcaccagcccagtgtccggcatcaacggcgacatccgggccaagaagatcgccagcattgccgacgtgtgcgagagcatgaaggaacagctgctggtgctggtggaatgggccaagtacatccccgccttttgcgagctgcccctggacgatcaggtggccctgctgagagcacacgccggcgaacatctgctgctgggagccaccaagcggagcatggtgttcaaggacgtgctgctgctgggcaacgactacatcgtgcccagacactgccctgagctggccgagatgagccgggtgtccatcagaatcctggacgaactggtgctgccgtttcaggaactgcagatcgacgacaacgagtacgcctacctgaaggccatcatctttttcgaccccgacgccaagggcctgagcgaccctggcaagatcaagcggctgagagcccaggtgcaagtgtccctggaagattacatcaacgaccggcagtacgacagccggggcagatttggcgaactgctcctgctgctgcccaccctgcagagcatcacctggcagatgatcgagcagatccagttcatcaagctgttcggcatggccaagatcgacaatctgctgcaggaaatgctgctcgggggcagcccttctgatgcccctcatgcccaccaccctctgcaccctcacctgatgcaagaacacatgggcaccaatgtgatcgtggccaacacaatgcccacccacctgagcaacggccagatgtgcgagtggcccagacctagaggacaggccgccacacctgagacacctcagccttctccacctggcggctctggcagcgagccttacaaactgctgcctggcgctgtggccaccatcgtgaaacctctgagcgccatcccccagcccaccatcaccaagcaggaagtgatctgaggactagtccctgttcccagagcccacttttttttctttttttgaaataaaatagcctgtctttcagatctaaaaaaaaaaaaaaaaaaaaaaaaaaaaaaaaaaaaaaaaaaaaaaaaaaaaaaaaaaaaaaaaaaaaaaaaaaaaaaaaaaaaaaaaaaaaaaaaaaaa

SEQ ID NO: 5516 - RNA, 1562 nt, synthetic construct
  misc_feature 1..1562: note = mRNA a-1 (A100) (opt29) from Homo sapiens__NP_000448.3__HNF4A(39-474)(S313E)
  source 1..1562: mol_type = other RNA
aggagagtcccgcagtcggcgtccagcggctctgcttgttcgtgtgtgtgtcgttgcaggccttattcaagcttaccatggacaccagccctagcgagggcaccaacctgaacgcccctaatagcctgggagtgtccgccctgtgtgccatctgtggcgatagagccaccggcaagcactacggcgccagctcttgtgatggctgcaagggcttcttccggcggagcgtgcggaagaaccacatgtacagctgccggttcagccggcagtgcgtggtggacaaggataagcggaaccagtgccggtactgcagactgaagaagtgcttcagagccggcatgaagaaagaagccgtgcagaacgagcgggaccggatcagcaccagaagaagcagctacgaggacagcagcctgcccagcatcaacgccctgctgcaggccgaggtgctgagcagacagatcaccagcccagtgtccggcatcaacggcgacatccgggccaagaagatcgccagcattgccgacgtgtgcgagagcatgaaggaacagctgctggtgctggtggaatgggccaagtacatccccgccttttgcgagctgcccctggacgatcaggtggccctgctgagagcacacgccggcgaacatctgctgctgggagccaccaagcggagcatggtgttcaaggacgtgctgctgctgggcaacgactacatcgtgcccagacactgccctgagctggccgagatgagccgggtgtccatcagaatcctggacgaactggtgctgccgtttcaggaactgcagatcgacgacaacgagtacgcctacctgaaggccatcatctttttcgaccccgacgccaagggcctgagcgaccctggcaagatcaagcggctgagagaacaggtgcaagtgtccctggaagattacatcaacgaccggcagtacgacagccggggcagatttggcgaactgctcctgctgctgcccaccctgcagagcatcacctggcagatgatcgagcagatccagttcatcaagctgttcggcatggccaagatcgacaatctgctgcaggaaatgctgctcgggggcagcccttctgatgcccctcatgcccaccaccctctgcaccctcacctgatgcaagaacacatgggcaccaatgtgatcgtggccaacacaatgcccacccacctgagcaacggccagatgtgcgagtggcccagacctagaggacaggccgccacacctgagacacctcagccttctccacctggcggctctggcagcgagccttacaaactgctgcctggcgctgtggccaccatcgtgaaacctctgagcgccatcccccagcccaccatcaccaagcaggaagtgatctgaggactagtccctgttcccagagcccacttttttttctttttttgaaataaaatagcctgtctttcagatctaaaaaaaaaaaaaaaaaaaaaaaaaaaaaaaaaaaaaaaaaaaaaaaaaaaaaaaaaaaaaaaaaaaaaaaaaaaaaaaaaaaaaaaaaaaaaaaaaaaa

SEQ ID NO: 5517 - RNA, 1562 nt, synthetic construct
  misc_feature 1..1562: note = mRNA a-1 (A100) (opt29) from Homo sapiens__NP_000448.3__HNF4A(39-474)(S142A_S143A)
  source 1..1562: mol_type = other RNA
aggagagtcccgcagtcggcgtccagcggctctgcttgttcgtgtgtgtgtcgttgcaggccttattcaagcttaccatggacaccagccctagcgagggcaccaacctgaacgcccctaatagcctgggagtgtccgccctgtgtgccatctgtggcgatagagccaccggcaagcactacggcgccagctcttgtgatggctgcaagggcttcttccggcggagcgtgcggaagaaccacatgtacagctgccggttcagccggcagtgcgtggtggacaaggataagcggaaccagtgccggtactgcagactgaagaagtgcttcagagccggcatgaagaaagaagccgtgcagaacgagcgggaccggatcagcaccagaagagccgcctacgaggacagcagcctgcccagcatcaacgccctgctgcaggccgaggtgctgagcagacagatcaccagcccagtgtccggcatcaacggcgacatccgggccaagaagatcgccagcattgccgacgtgtgcgagagcatgaaggaacagctgctggtgctggtggaatgggccaagtacatccccgccttttgcgagctgcccctggacgatcaggtggccctgctgagagcacacgccggcgaacatctgctgctgggagccaccaagcggagcatggtgttcaaggacgtgctgctgctgggcaacgactacatcgtgcccagacactgccctgagctggccgagatgagccgggtgtccatcagaatcctggacgaactggtgctgccgtttcaggaactgcagatcgacgacaacgagtacgcctacctgaaggccatcatctttttcgaccccgacgccaagggcctgagcgaccctggcaagatcaagcggctgagaagccaggtgcaagtgtccctggaagattacatcaacgaccggcagtacgacagccggggcagatttggcgaactgctcctgctgctgcccaccctgcagagcatcacctggcagatgatcgagcagatccagttcatcaagctgttcggcatggccaagatcgacaatctgctgcaggaaatgctgctcgggggcagcccttctgatgcccctcatgcccaccaccctctgcaccctcacctgatgcaagaacacatgggcaccaatgtgatcgtggccaacacaatgcccacccacctgagcaacggccagatgtgcgagtggcccagacctagaggacaggccgccacacctgagacacctcagccttctccacctggcggctctggcagcgagccttacaaactgctgcctggcgctgtggccaccatcgtgaaacctctgagcgccatcccccagcccaccatcaccaagcaggaagtgatctgaggactagtccctgttcccagagcccacttttttttctttttttgaaataaaatagcctgtctttcagatctaaaaaaaaaaaaaaaaaaaaaaaaaaaaaaaaaaaaaaaaaaaaaaaaaaaaaaaaaaaaaaaaaaaaaaaaaaaaaaaaaaaaaaaaaaaaaaaaaaaa

SEQ ID NO: 5518 - RNA, 1562 nt, synthetic construct
  misc_feature 1..1562: note = mRNA a-1 (A100) (opt29) from Homo sapiens__NP_000448.3__HNF4A(39-474)(S142E_S143E)
  source 1..1562: mol_type = other RNA
aggagagtcccgcagtcggcgtccagcggctctgcttgttcgtgtgtgtgtcgttgcaggccttattcaagcttaccatggacaccagccctagcgagggcaccaacctgaacgcccctaatagcctgggagtgtccgccctgtgtgccatctgtggcgatagagccaccggcaagcactacggcgccagctcttgtgatggctgcaagggcttcttccggcggagcgtgcggaagaaccacatgtacagctgccggttcagccggcagtgcgtggtggacaaggataagcggaaccagtgccggtactgcagactgaagaagtgcttcagagccggcatgaagaaagaagccgtgcagaacgagcgggaccggatcagcaccagaagagaagagtacgaggacagcagcctgcccagcatcaacgccctgctgcaggccgaggtgctgagcagacagatcaccagcccagtgtccggcatcaacggcgacatccgggccaagaagatcgccagcattgccgacgtgtgcgagagcatgaaggaacagctgctggtgctggtggaatgggccaagtacatccccgccttttgcgagctgcccctggacgatcaggtggccctgctgagagcacacgccggcgaacatctgctgctgggagccaccaagcggagcatggtgttcaaggacgtgctgctgctgggcaacgactacatcgtgcccagacactgccctgagctggccgagatgagccgggtgtccatcagaatcctggacgaactggtgctgccgtttcaggaactgcagatcgacgacaacgagtacgcctacctgaaggccatcatctttttcgaccccgacgccaagggcctgagcgaccctggcaagatcaagcggctgagaagccaggtgcaagtgtccctggaagattacatcaacgaccggcagtacgacagccggggcagatttggcgaactgctcctgctgctgcccaccctgcagagcatcacctggcagatgatcgagcagatccagttcatcaagctgttcggcatggccaagatcgacaatctgctgcaggaaatgctgctcgggggcagcccttctgatgcccctcatgcccaccaccctctgcaccctcacctgatgcaagaacacatgggcaccaatgtgatcgtggccaacacaatgcccacccacctgagcaacggccagatgtgcgagtggcccagacctagaggacaggccgccacacctgagacacctcagccttctccacctggcggctctggcagcgagccttacaaactgctgcctggcgctgtggccaccatcgtgaaacctctgagcgccatcccccagcccaccatcaccaagcaggaagtgatctgaggactagtccctgttcccagagcccacttttttttctttttttgaaataaaatagcctgtctttcagatctaaaaaaaaaaaaaaaaaaaaaaaaaaaaaaaaaaaaaaaaaaaaaaaaaaaaaaaaaaaaaaaaaaaaaaaaaaaaaaaaaaaaaaaaaaaaaaaaaaaa

SEQ ID NO: 5519 - RNA, 1562 nt, synthetic construct
  misc_feature 1..1562: note = mRNA a-1 (A100) (opt29) from Homo sapiens__NP_000448.3__HNF4A(39-474)(S143A)
  source 1..1562: mol_type = other RNA
aggagagtcccgcagtcggcgtccagcggctctgcttgttcgtgtgtgtgtcgttgcaggccttattcaagcttaccatggacaccagccctagcgagggcaccaacctgaacgcccctaatagcctgggagtgtccgccctgtgtgccatctgtggcgatagagccaccggcaagcactacggcgccagctcttgtgatggctgcaagggcttcttccggcggagcgtgcggaagaaccacatgtacagctgccggttcagccggcagtgcgtggtggacaaggataagcggaaccagtgccggtactgcagactgaagaagtgcttcagagccggcatgaagaaagaagccgtgcagaacgagcgggaccggatcagcaccagaagaagcgcctacgaggacagcagcctgcccagcatcaacgccctgctgcaggccgaggtgctgagcagacagatcaccagcccagtgtccggcatcaacggcgacatccgggccaagaagatcgccagcattgccgacgtgtgcgagagcatgaaggaacagctgctggtgctggtggaatgggccaagtacatccccgccttttgcgagctgcccctggacgatcaggtggccctgctgagagcacacgccggcgaacatctgctgctgggagccaccaagcggagcatggtgttcaaggacgtgctgctgctgggcaacgactacatcgtgcccagacactgccctgagctggccgagatgagccgggtgtccatcagaatcctggacgaactggtgctgccgtttcaggaactgcagatcgacgacaacgagtacgcctacctgaaggccatcatctttttcgaccccgacgccaagggcctgagcgaccctggcaagatcaagcggctgagaagccaggtgcaagtgtccctggaagattacatcaacgaccggcagtacgacagccggggcagatttggcgaactgctcctgctgctgcccaccctgcagagcatcacctggcagatgatcgagcagatccagttcatcaagctgttcggcatggccaagatcgacaatctgctgcaggaaatgctgctcgggggcagcccttctgatgcccctcatgcccaccaccctctgcaccctcacctgatgcaagaacacatgggcaccaatgtgatcgtggccaacacaatgcccacccacctgagcaacggccagatgtgcgagtggcccagacctagaggacaggccgccacacctgagacacctcagccttctccacctggcggctctggcagcgagccttacaaactgctgcctggcgctgtggccaccatcgtgaaacctctgagcgccatcccccagcccaccatcaccaagcaggaagtgatctgaggactagtccctgttcccagagcccacttttttttctttttttgaaataaaatagcctgtctttcagatctaaaaaaaaaaaaaaaaaaaaaaaaaaaaaaaaaaaaaaaaaaaaaaaaaaaaaaaaaaaaaaaaaaaaaaaaaaaaaaaaaaaaaaaaaaaaaaaaaaaa

SEQ ID NO: 5520 - RNA, 1562 nt, synthetic construct
  misc_feature 1..1562: note = mRNA a-1 (A100) (opt29) from Homo sapiens__NP_000448.3__HNF4A(39-474)(T166A)
  source 1..1562: mol_type = other RNA
aggagagtcccgcagtcggcgtccagcggctctgcttgttcgtgtgtgtgtcgttgcaggccttattcaagcttaccatggacaccagccctagcgagggcaccaacctgaacgcccctaatagcctgggagtgtccgccctgtgtgccatctgtggcgatagagccaccggcaagcactacggcgccagctcttgtgatggctgcaagggcttcttccggcggagcgtgcggaagaaccacatgtacagctgccggttcagccggcagtgcgtggtggacaaggataagcggaaccagtgccggtactgcagactgaagaagtgcttcagagccggcatgaagaaagaagccgtgcagaacgagcgggaccggatcagcaccagaagaagcagctacgaggacagcagcctgcccagcatcaacgccctgctgcaggccgaggtgctgagcagacagatcgccagcccagtgtccggcatcaacggcgacatccgggccaagaagatcgccagcattgccgacgtgtgcgagagcatgaaggaacagctgctggtgctggtggaatgggccaagtacatccccgccttttgcgagctgcccctggacgatcaggtggccctgctgagagcacacgccggcgaacatctgctgctgggagccaccaagcggagcatggtgttcaaggacgtgctgctgctgggcaacgactacatcgtgcccagacactgccctgagctggccgagatgagccgggtgtccatcagaatcctggacgaactggtgctgccgtttcaggaactgcagatcgacgacaacgagtacgcctacctgaaggccatcatctttttcgaccccgacgccaagggcctgagcgaccctggcaagatcaagcggctgagaagccaggtgcaagtgtccctggaagattacatcaacgaccggcagtacgacagccggggcagatttggcgaactgctcctgctgctgcccaccctgcagagcatcacctggcagatgatcgagcagatccagttcatcaagctgttcggcatggccaagatcgacaatctgctgcaggaaatgctgctcgggggcagcccttctgatgcccctcatgcccaccaccctctgcaccctcacctgatgcaagaacacatgggcaccaatgtgatcgtggccaacacaatgcccacccacctgagcaacggccagatgtgcgagtggcccagacctagaggacaggccgccacacctgagacacctcagccttctccacctggcggctctggcagcgagccttacaaactgctgcctggcgctgtggccaccatcgtgaaacctctgagcgccatcccccagcccaccatcaccaagcaggaagtgatctgaggactagtccctgttcccagagcccacttttttttctttttttgaaataaaatagcctgtctttcagatctaaaaaaaaaaaaaaaaaaaaaaaaaaaaaaaaaaaaaaaaaaaaaaaaaaaaaaaaaaaaaaaaaaaaaaaaaaaaaaaaaaaaaaaaaaaaaaaaaaaa

SEQ ID NO: 5521 - RNA, 1562 nt, synthetic construct
  misc_feature 1..1562: note = mRNA a-1 (A100) (opt29) from Homo sapiens__NP_000448.3__HNF4A(39-474)(S167E)
  source 1..1562: mol_type = other RNA
aggagagtcccgcagtcggcgtccagcggctctgcttgttcgtgtgtgtgtcgttgcaggccttattcaagcttaccatggacaccagccctagcgagggcaccaacctgaacgcccctaatagcctgggagtgtccgccctgtgtgccatctgtggcgatagagccaccggcaagcactacggcgccagctcttgtgatggctgcaagggcttcttccggcggagcgtgcggaagaaccacatgtacagctgccggttcagccggcagtgcgtggtggacaaggataagcggaaccagtgccggtactgcagactgaagaagtgcttcagagccggcatgaagaaagaagccgtgcagaacgagcgggaccggatcagcaccagaagaagcagctacgaggacagcagcctgcccagcatcaacgccctgctgcaggccgaggtgctgagcagacagatcaccgaaccagtgtccggcatcaacggcgacatccgggccaagaagatcgccagcattgccgacgtgtgcgagagcatgaaggaacagctgctggtgctggtggaatgggccaagtacatccccgccttttgcgagctgcccctggacgatcaggtggccctgctgagagcacacgccggcgaacatctgctgctgggagccaccaagcggagcatggtgttcaaggacgtgctgctgctgggcaacgactacatcgtgcccagacactgccctgagctggccgagatgagccgggtgtccatcagaatcctggacgaactggtgctgccgtttcaggaactgcagatcgacgacaacgagtacgcctacctgaaggccatcatctttttcgaccccgacgccaagggcctgagcgaccctggcaagatcaagcggctgagaagccaggtgcaagtgtccctggaagattacatcaacgaccggcagtacgacagccggggcagatttggcgaactgctcctgctgctgcccaccctgcagagcatcacctggcagatgatcgagcagatccagttcatcaagctgttcggcatggccaagatcgacaatctgctgcaggaaatgctgctcgggggcagcccttctgatgcccctcatgcccaccaccctctgcaccctcacctgatgcaagaacacatgggcaccaatgtgatcgtggccaacacaatgcccacccacctgagcaacggccagatgtgcgagtggcccagacctagaggacaggccgccacacctgagacacctcagccttctccacctggcggctctggcagcgagccttacaaactgctgcctggcgctgtggccaccatcgtgaaacctctgagcgccatcccccagcccaccatcaccaagcaggaagtgatctgaggactagtccctgttcccagagcccacttttttttctttttttgaaataaaatagcctgtctttcagatctaaaaaaaaaaaaaaaaaaaaaaaaaaaaaaaaaaaaaaaaaaaaaaaaaaaaaaaaaaaaaaaaaaaaaaaaaaaaaaaaaaaaaaaaaaaaaaaaaaaa

SEQ ID NO: 5522 - RNA, 1562 nt, synthetic construct
  misc_feature 1..1562: note = mRNA a-1 (A100) (opt29) from Homo sapiens__NP_000448.3__HNF4A(39-474)(S167A)
  source 1..1562: mol_type = other RNA
aggagagtcccgcagtcggcgtccagcggctctgcttgttcgtgtgtgtgtcgttgcaggccttattcaagcttaccatggacaccagccctagcgagggcaccaacctgaacgcccctaatagcctgggagtgtccgccctgtgtgccatctgtggcgatagagccaccggcaagcactacggcgccagctcttgtgatggctgcaagggcttcttccggcggagcgtgcggaagaaccacatgtacagctgccggttcagccggcagtgcgtggtggacaaggataagcggaaccagtgccggtactgcagactgaagaagtgcttcagagccggcatgaagaaagaagccgtgcagaacgagcgggaccggatcagcaccagaagaagcagctacgaggacagcagcctgcccagcatcaacgccctgctgcaggccgaggtgctgagcagacagatcaccgccccagtgtccggcatcaacggcgacatccgggccaagaagatcgccagcattgccgacgtgtgcgagagcatgaaggaacagctgctggtgctggtggaatgggccaagtacatccccgccttttgcgagctgcccctggacgatcaggtggccctgctgagagcacacgccggcgaacatctgctgctgggagccaccaagcggagcatggtgttcaaggacgtgctgctgctgggcaacgactacatcgtgcccagacactgccctgagctggccgagatgagccgggtgtccatcagaatcctggacgaactggtgctgccgtttcaggaactgcagatcgacgacaacgagtacgcctacctgaaggccatcatctttttcgaccccgacgccaagggcctgagcgaccctggcaagatcaagcggctgagaagccaggtgcaagtgtccctggaagattacatcaacgaccggcagtacgacagccggggcagatttggcgaactgctcctgctgctgcccaccctgcagagcatcacctggcagatgatcgagcagatccagttcatcaagctgttcggcatggccaagatcgacaatctgctgcaggaaatgctgctcgggggcagcccttctgatgcccctcatgcccaccaccctctgcaccctcacctgatgcaagaacacatgggcaccaatgtgatcgtggccaacacaatgcccacccacctgagcaacggccagatgtgcgagtggcccagacctagaggacaggccgccacacctgagacacctcagccttctccacctggcggctctggcagcgagccttacaaactgctgcctggcgctgtggccaccatcgtgaaacctctgagcgccatcccccagcccaccatcaccaagcaggaagtgatctgaggactagtccctgttcccagagcccacttttttttctttttttgaaataaaatagcctgtctttcagatctaaaaaaaaaaaaaaaaaaaaaaaaaaaaaaaaaaaaaaaaaaaaaaaaaaaaaaaaaaaaaaaaaaaaaaaaaaaaaaaaaaaaaaaaaaaaaaaaaaaa

SEQ ID NO: 5523 - RNA, 1562 nt, synthetic construct
  misc_feature 1..1562: note = mRNA a-1 (A100) (opt29) from Homo sapiens__NP_000448.3__HNF4A(39-474)(S167A_S378A_T429A_T432A _S436A)
  source 1..1562: mol_type = other RNA
aggagagtcccgcagtcggcgtccagcggctctgcttgttcgtgtgtgtgtcgttgcaggccttattcaagcttaccatggacaccagccctagcgagggcaccaacctgaacgcccctaatagcctgggagtgtccgccctgtgtgccatctgtggcgatagagccaccggcaagcactacggcgccagctcttgtgatggctgcaagggcttcttccggcggagcgtgcggaagaaccacatgtacagctgccggttcagccggcagtgcgtggtggacaaggataagcggaaccagtgccggtactgcagactgaagaagtgcttcagagccggcatgaagaaagaagccgtgcagaacgagcgggaccggatcagcaccagaagaagcagctacgaggacagcagcctgcccagcatcaacgccctgctgcaggccgaggtgctgagcagacagatcaccgccccagtgtccggcatcaacggcgacatccgggccaagaagatcgccagcattgccgacgtgtgcgagagcatgaaggaacagctgctggtgctggtggaatgggccaagtacatccccgccttttgcgagctgcccctggacgatcaggtggccctgctgagagcacacgccggcgaacatctgctgctgggagccaccaagcggagcatggtgttcaaggacgtgctgctgctgggcaacgactacatcgtgcccagacactgccctgagctggccgagatgagccgggtgtccatcagaatcctggacgaactggtgctgccgtttcaggaactgcagatcgacgacaacgagtacgcctacctgaaggccatcatctttttcgaccccgacgccaagggcctgagcgaccctggcaagatcaagcggctgagaagccaggtgcaagtgtccctggaagattacatcaacgaccggcagtacgacagccggggcagatttggcgaactgctcctgctgctgcccaccctgcagagcatcacctggcagatgatcgagcagatccagttcatcaagctgttcggcatggccaagatcgacaatctgctgcaggaaatgctgctcgggggcgccccttctgatgcccctcatgcccaccaccctctgcaccctcacctgatgcaagaacacatgggcaccaatgtgatcgtggccaacacaatgcccacccacctgagcaacggccagatgtgcgagtggcccagacctagaggacaggccgccgcccctgaggcccctcagcctgccccacctggcggctctggcagcgagccttacaaactgctgcctggcgctgtggccaccatcgtgaaacctctgagcgccatcccccagcccaccatcaccaagcaggaagtgatctgaggactagtccctgttcccagagcccacttttttttctttttttgaaataaaatagcctgtctttcagatctaaaaaaaaaaaaaaaaaaaaaaaaaaaaaaaaaaaaaaaaaaaaaaaaaaaaaaaaaaaaaaaaaaaaaaaaaaaaaaaaaaaaaaaaaaaaaaaaaaaa

SEQ ID NO: 5524 - RNA, 1562 nt, synthetic construct
  misc_feature 1..1562: note = mRNA a-1 (A100) (opt29) from Homo sapiens__NP_000448.3__HNF4A(39-474)(S167E_S378E_T429E_T432E _S436E)
  source 1..1562: mol_type = other RNA
aggagagtcccgcagtcggcgtccagcggctctgcttgttcgtgtgtgtgtcgttgcaggccttattcaagcttaccatggacaccagccctagcgagggcaccaacctgaacgcccctaatagcctgggagtgtccgccctgtgtgccatctgtggcgatagagccaccggcaagcactacggcgccagctcttgtgatggctgcaagggcttcttccggcggagcgtgcggaagaaccacatgtacagctgccggttcagccggcagtgcgtggtggacaaggataagcggaaccagtgccggtactgcagactgaagaagtgcttcagagccggcatgaagaaagaagccgtgcagaacgagcgggaccggatcagcaccagaagaagcagctacgaggacagcagcctgcccagcatcaacgccctgctgcaggccgaggtgctgagcagacagatcaccgaaccagtgtccggcatcaacggcgacatccgggccaagaagatcgccagcattgccgacgtgtgcgagagcatgaaggaacagctgctggtgctggtggaatgggccaagtacatccccgccttttgcgagctgcccctggacgatcaggtggccctgctgagagcacacgccggcgaacatctgctgctgggagccaccaagcggagcatggtgttcaaggacgtgctgctgctgggcaacgactacatcgtgcccagacactgccctgagctggccgagatgagccgggtgtccatcagaatcctggacgaactggtgctgccgtttcaggaactgcagatcgacgacaacgagtacgcctacctgaaggccatcatctttttcgaccccgacgccaagggcctgagcgaccctggcaagatcaagcggctgagaagccaggtgcaagtgtccctggaagattacatcaacgaccggcagtacgacagccggggcagatttggcgaactgctcctgctgctgcccaccctgcagagcatcacctggcagatgatcgagcagatccagttcatcaagctgttcggcatggccaagatcgacaatctgctgcaggaaatgctgctcgggggcgagccttctgatgcccctcatgcccaccaccctctgcaccctcacctgatgcaagaacacatgggcaccaatgtgatcgtggccaacacaatgcccacccacctgagcaacggccagatgtgcgagtggcccagacctagaggacaggccgccgaacctgaggagcctcagcctgaaccacctggcggctctggcagcgagccttacaaactgctgcctggcgctgtggccaccatcgtgaaacctctgagcgccatcccccagcccaccatcaccaagcaggaagtgatctgaggactagtccctgttcccagagcccacttttttttctttttttgaaataaaatagcctgtctttcagatctaaaaaaaaaaaaaaaaaaaaaaaaaaaaaaaaaaaaaaaaaaaaaaaaaaaaaaaaaaaaaaaaaaaaaaaaaaaaaaaaaaaaaaaaaaaaaaaaaaaa

SEQ ID NO: 5525 - RNA, 1562 nt, synthetic construct
  misc_feature 1..1562: note = mRNA a-1 (A100) (opt29) from Homo sapiens__NP_000448.3__HNF4A(39-474)(S87A)
  source 1..1562: mol_type = other RNA
aggagagtcccgcagtcggcgtccagcggctctgcttgttcgtgtgtgtgtcgttgcaggccttattcaagcttaccatggacaccagccctagcgagggcaccaacctgaacgcccctaatagcctgggagtgtccgccctgtgtgccatctgtggcgatagagccaccggcaagcactacggcgccagctcttgtgatggctgcaagggcttcttccggcgggccgtgcggaagaaccacatgtacagctgccggttcagccggcagtgcgtggtggacaaggataagcggaaccagtgccggtactgcagactgaagaagtgcttcagagccggcatgaagaaagaagccgtgcagaacgagcgggaccggatcagcaccagaagaagcagctacgaggacagcagcctgcccagcatcaacgccctgctgcaggccgaggtgctgagcagacagatcaccagcccagtgtccggcatcaacggcgacatccgggccaagaagatcgccagcattgccgacgtgtgcgagagcatgaaggaacagctgctggtgctggtggaatgggccaagtacatccccgccttttgcgagctgcccctggacgatcaggtggccctgctgagagcacacgccggcgaacatctgctgctgggagccaccaagcggagcatggtgttcaaggacgtgctgctgctgggcaacgactacatcgtgcccagacactgccctgagctggccgagatgagccgggtgtccatcagaatcctggacgaactggtgctgccgtttcaggaactgcagatcgacgacaacgagtacgcctacctgaaggccatcatctttttcgaccccgacgccaagggcctgagcgaccctggcaagatcaagcggctgagaagccaggtgcaagtgtccctggaagattacatcaacgaccggcagtacgacagccggggcagatttggcgaactgctcctgctgctgcccaccctgcagagcatcacctggcagatgatcgagcagatccagttcatcaagctgttcggcatggccaagatcgacaatctgctgcaggaaatgctgctcgggggcagcccttctgatgcccctcatgcccaccaccctctgcaccctcacctgatgcaagaacacatgggcaccaatgtgatcgtggccaacacaatgcccacccacctgagcaacggccagatgtgcgagtggcccagacctagaggacaggccgccacacctgagacacctcagccttctccacctggcggctctggcagcgagccttacaaactgctgcctggcgctgtggccaccatcgtgaaacctctgagcgccatcccccagcccaccatcaccaagcaggaagtgatctgaggactagtccctgttcccagagcccacttttttttctttttttgaaataaaatagcctgtctttcagatctaaaaaaaaaaaaaaaaaaaaaaaaaaaaaaaaaaaaaaaaaaaaaaaaaaaaaaaaaaaaaaaaaaaaaaaaaaaaaaaaaaaaaaaaaaaaaaaaaaaa

SEQ ID NO: 5526 - RNA, 1562 nt, synthetic construct
  misc_feature 1..1562: note = mRNA a-1 (A100) (opt29) from Homo sapiens__NP_000448.3__HNF4A(39-474)(S87E)
  source 1..1562: mol_type = other RNA
aggagagtcccgcagtcggcgtccagcggctctgcttgttcgtgtgtgtgtcgttgcaggccttattcaagcttaccatggacaccagccctagcgagggcaccaacctgaacgcccctaatagcctgggagtgtccgccctgtgtgccatctgtggcgatagagccaccggcaagcactacggcgccagctcttgtgatggctgcaagggcttcttccggcgggaggtgcggaagaaccacatgtacagctgccggttcagccggcagtgcgtggtggacaaggataagcggaaccagtgccggtactgcagactgaagaagtgcttcagagccggcatgaagaaagaagccgtgcagaacgagcgggaccggatcagcaccagaagaagcagctacgaggacagcagcctgcccagcatcaacgccctgctgcaggccgaggtgctgagcagacagatcaccagcccagtgtccggcatcaacggcgacatccgggccaagaagatcgccagcattgccgacgtgtgcgagagcatgaaggaacagctgctggtgctggtggaatgggccaagtacatccccgccttttgcgagctgcccctggacgatcaggtggccctgctgagagcacacgccggcgaacatctgctgctgggagccaccaagcggagcatggtgttcaaggacgtgctgctgctgggcaacgactacatcgtgcccagacactgccctgagctggccgagatgagccgggtgtccatcagaatcctggacgaactggtgctgccgtttcaggaactgcagatcgacgacaacgagtacgcctacctgaaggccatcatctttttcgaccccgacgccaagggcctgagcgaccctggcaagatcaagcggctgagaagccaggtgcaagtgtccctggaagattacatcaacgaccggcagtacgacagccggggcagatttggcgaactgctcctgctgctgcccaccctgcagagcatcacctggcagatgatcgagcagatccagttcatcaagctgttcggcatggccaagatcgacaatctgctgcaggaaatgctgctcgggggcagcccttctgatgcccctcatgcccaccaccctctgcaccctcacctgatgcaagaacacatgggcaccaatgtgatcgtggccaacacaatgcccacccacctgagcaacggccagatgtgcgagtggcccagacctagaggacaggccgccacacctgagacacctcagccttctccacctggcggctctggcagcgagccttacaaactgctgcctggcgctgtggccaccatcgtgaaacctctgagcgccatcccccagcccaccatcaccaagcaggaagtgatctgaggactagtccctgttcccagagcccacttttttttctttttttgaaataaaatagcctgtctttcagatctaaaaaaaaaaaaaaaaaaaaaaaaaaaaaaaaaaaaaaaaaaaaaaaaaaaaaaaaaaaaaaaaaaaaaaaaaaaaaaaaaaaaaaaaaaaaaaaaaaaa

SEQ ID NO: 5527 - RNA, 1562 nt, synthetic construct; identical to SEQ ID NO: 5514
  misc_feature 1..1562: note = mRNA a-1 (A100) (opt29) from Homo sapiens__NP_000448.3__HNF4A(39-474)(R2V)
  source 1..1562: mol_type = other RNA

SEQ ID NO: 5528 - RNA, 1562 nt, synthetic construct; identical to SEQ ID NO: 5514
  misc_feature 1..1562: note = mRNA a-1 (A100) (opt29) from Homo sapiens__NP_000448.3__HNF4A(39-474)(R2V_K5V)
  source 1..1562: mol_type = other RNA

SEQ ID NO: 5529 - RNA, 1562 nt, synthetic construct
  misc_feature 1..1562: note = mRNA a-1 (A100) (opt29) from Homo sapiens__NP_000448.3__HNF4A(39-474)(K179R_K180R)
  source 1..1562: mol_type = other RNA
aggagagtcccgcagtcggcgtccagcggctctgcttgttcgtgtgtgtgtcgttgcaggccttattcaagcttaccatggacaccagccctagcgagggcaccaacctgaacgcccctaatagcctgggagtgtccgccctgtgtgccatctgtggcgatagagccaccggcaagcactacggcgccagctcttgtgatggctgcaagggcttcttccggcggagcgtgcggaagaaccacatgtacagctgccggttcagccggcagtgcgtggtggacaaggataagcggaaccagtgccggtactgcagactgaagaagtgcttcagagccggcatgaagaaagaagccgtgcagaacgagcgggaccggatcagcaccagaagaagcagctacgaggacagcagcctgcccagcatcaacgccctgctgcaggccgaggtgctgagcagacagatcaccagcccagtgtccggcatcaacggcgacatccgggcccggagaatcgccagcattgccgacgtgtgcgagagcatgaaggaacagctgctggtgctggtggaatgggccaagtacatccccgccttttgcgagctgcccctggacgatcaggtggccctgctgagagcacacgccggcgaacatctgctgctgggagccaccaagcggagcatggtgttcaaggacgtgctgctgctgggcaacgactacatcgtgcccagacactgccctgagctggccgagatgagccgggtgtccatcagaatcctggacgaactggtgctgccgtttcaggaactgcagatcgacgacaacgagtacgcctacctgaaggccatcatctttttcgaccccgacgccaagggcctgagcgaccctggcaagatcaagcggctgagaagccaggtgcaagtgtccctggaagattacatcaacgaccggcagtacgacagccggggcagatttggcgaactgctcctgctgctgcccaccctgcagagcatcacctggcagatgatcgagcagatccagttcatcaagctgttcggcatggccaagatcgacaatctgctgcaggaaatgctgctcgggggcagcccttctgatgcccctcatgcccaccaccctctgcaccctcacctgatgcaagaacacatgggcaccaatgtgatcgtggccaacacaatgcccacccacctgagcaacggccagatgtgcgagtggcccagacctagaggacaggccgccacacctgagacacctcagccttctccacctggcggctctggcagcgagccttacaaactgctgcctggcgctgtggccaccatcgtgaaacctctgagcgccatcccccagcccaccatcaccaagcaggaagtgatctgaggactagtccctgttcccagagcccacttttttttctttttttgaaataaaatagcctgtctttcagatctaaaaaaaaaaaaaaaaaaaaaaaaaaaaaaaaaaaaaaaaaaaaaaaaaaaaaaaaaaaaaaaaaaaaaaaaaaaaaaaaaaaaaaaaaaaaaaaaaaaa

SEQ ID NO: 5530 - RNA, 1562 nt, synthetic construct
  misc_feature 1..1562: note = mRNA a-1 (A100) (opt29) from Homo sapiens__NP_000448.3__HNF4A(39-474)(K234R)
  source 1..1562: mol_type = other RNA
aggagagtcccgcagtcggcgtccagcggctctgcttgttcgtgtgtgtgtcgttgcaggccttattcaagcttaccatggacaccagccctagcgagggcaccaacctgaacgcccctaatagcctgggagtgtccgccctgtgtgccatctgtggcgatagagccaccggcaagcactacggcgccagctcttgtgatggctgcaagggcttcttccggcggagcgtgcggaagaaccacatgtacagctgccggttcagccggcagtgcgtggtggacaaggataagcggaaccagtgccggtactgcagactgaagaagtgcttcagagccggcatgaagaaagaagccgtgcagaacgagcgggaccggatcagcaccagaagaagcagctacgaggacagcagcctgcccagcatcaacgccctgctgcaggccgaggtgctgagcagacagatcaccagcccagtgtccggcatcaacggcgacatccgggccaagaagatcgccagcattgccgacgtgtgcgagagcatgaaggaacagctgctggtgctggtggaatgggccaagtacatccccgccttttgcgagctgcccctggacgatcaggtggccctgctgagagcacacgccggcgaacatctgctgctgggagccacccggcggagcatggtgttcaaggacgtgctgctgctgggcaacgactacatcgtgcccagacactgccctgagctggccgagatgagccgggtgtccatcagaatcctggacgaactggtgctgccgtttcaggaactgcagatcgacgacaacgagtacgcctacctgaaggccatcatctttttcgaccccgacgccaagggcctgagcgaccctggcaagatcaagcggctgagaagccaggtgcaagtgtccctggaagattacatcaacgaccggcagtacgacagccggggcagatttggcgaactgctcctgctgctgcccaccctgcagagcatcacctggcagatgatcgagcagatccagttcatcaagctgttcggcatggccaagatcgacaatctgctgcaggaaatgctgctcgggggcagcccttctgatgcccctcatgcccaccaccctctgcaccctcacctgatgcaagaacacatgggcaccaatgtgatcgtggccaacacaatgcccacccacctgagcaacggccagatgtgcgagtggcccagacctagaggacaggccgccacacctgagacacctcagccttctccacctggcggctctggcagcgagccttacaaactgctgcctggcgctgtggccaccatcgtgaaacctctgagcgccatcccccagcccaccatcaccaagcaggaagtgatctgaggactagtccctgttcccagagcccacttttttttctttttttgaaataaaatagcctgtctttcagatctaaaaaaaaaaaaaaaaaaaaaaaaaaaaaaaaaaaaaaaaaaaaaaaaaaaaaaaaaaaaaaaaaaaaaaaaaaaaaaaaaaaaaaaaaaaaaaaaaaaa

SEQ ID NO: 5531 - RNA, 1562 nt, synthetic construct
  misc_feature 1..1562: note = mRNA a-1 (A100) (opt29) from Homo sapiens__NP_000448.3__HNF4A(39-474)(K300R)
  source 1..1562: mol_type = other RNA
aggagagtcccgcagtcggcgtccagcggctctgcttgttcgtgtgtgtgtcgttgcaggccttattcaagcttaccatggacaccagccctagcgagggcaccaacctgaacgcccctaatagcctgggagtgtccgccctgtgtgccatctgtggcgatagagccaccggcaagcactacggcgccagctcttgtgatggctgcaagggcttcttccggcggagcgtgcggaagaaccacatgtacagctgccggttcagccggcagtgcgtggtggacaaggataagcggaaccagtgccggtactgcagactgaagaagtgcttcagagccggcatgaagaaagaagccgtgcagaacgagcgggaccggatcagcaccagaagaagcagctacgaggacagcagcctgcccagcatcaacgccctgctgcaggccgaggtgctgagcagacagatcaccagcccagtgtccggcatcaacggcgacatccgggccaagaagatcgccagcattgccgacgtgtgcgagagcatgaaggaacagctgctggtgctggtggaatgggccaagtacatccccgccttttgcgagctgcccctggacgatcaggtggccctgctgagagcacacgccggcgaacatctgctgctgggagccaccaagcggagcatggtgttcaaggacgtgctgctgctgggcaacgactacatcgtgcccagacactgccctgagctggccgagatgagccgggtgtccatcagaatcctggacgaactggtgctgccgtttcaggaactgcagatcgacgacaacgagtacgcctacctgaaggccatcatctttttcgaccccgacgccagaggcctgagcgaccctggcaagatcaagcggctgagaagccaggtgcaagtgtccctggaagattacatcaacgaccggcagtacgacagccggggcagatttggcgaactgctcctgctgctgcccaccctgcagagcatcacctggcagatgatcgagcagatccagttcatcaagctgttcggcatggccaagatcgacaatctgctgcaggaaatgctgctcgggggcagcccttctgatgcccctcatgcccaccaccctctgcaccctcacctgatgcaagaacacatgggcaccaatgtgatcgtggccaacacaatgcccacccacctgagcaacggccagatgtgcgagtggcccagacctagaggacaggccgccacacctgagacacctcagccttctccacctggcggctctggcagcgagccttacaaactgctgcctggcgctgtggccaccatcgtgaaacctctgagcgccatcccccagcccaccatcaccaagcaggaagtgatctgaggactagtccctgttcccagagcccacttttttttctttttttgaaataaaatagcctgtctttcagatctaaaaaaaaaaaaaaaaaaaaaaaaaaaaaaaaaaaaaaaaaaaaaaaaaaaaaaaaaaaaaaaaaaaaaaaaaaaaaaaaaaaaaaaaaaaaaaaaaaaa

SEQ ID NO: 5532 - RNA, 1562 nt, synthetic construct
  misc_feature 1..1562: note = mRNA a-1 (A100) (opt29) from Homo sapiens__NP_000448.3__HNF4A(39-474)(K300R_K307R_K309R)
  source 1..1562: mol_type = other RNA
aggagagtcccgcagtcggcgtccagcggctctgcttgttcgtgtgtgtgtcgttgcaggccttattcaagcttaccatggacaccagccctagcgagggcaccaacctgaacgcccctaatagcctgggagtgtccgccctgtgtgccatctgtggcgatagagccaccggcaagcactacggcgccagctcttgtgatggctgcaagggcttcttccggcggagcgtgcggaagaaccacatgtacagctgccggttcagccggcagtgcgtggtggacaaggataagcggaaccagtgccggtactgcagactgaagaagtgcttcagagccggcatgaagaaagaagccgtgcagaacgagcgggaccggatcagcaccagaagaagcagctacgaggacagcagcctgcccagcatcaacgccctgctgcaggccgaggtgctgagcagacagatcaccagcccagtgtccggcatcaacggcgacatccgggccaagaagatcgccagcattgccgacgtgtgcgagagcatgaaggaacagctgctggtgctggtggaatgggccaagtacatccccgccttttgcgagctgcccctggacgatcaggtggccctgctgagagcacacgccggcgaacatctgctgctgggagccaccaagcggagcatggtgttcaaggacgtgctgctgctgggcaacgactacatcgtgcccagacactgccctgagctggccgagatgagccgggtgtccatcagaatcctggacgaactggtgctgccgtttcaggaactgcagatcgacgacaacgagtacgcctacctgaaggccatcatctttttcgaccccgacgccagaggcctgagcgaccctggccggatcagacggctgagaagccaggtgcaagtgtccctggaagattacatcaacgaccggcagtacgacagccggggcagatttggcgaactgctcctgctgctgcccaccctgcagagcatcacctggcagatgatcgagcagatccagttcatcaagctgttcggcatggccaagatcgacaatctgctgcaggaaatgctgctcgggggcagcccttctgatgcccctcatgcccaccaccctctgcaccctcacctgatgcaagaacacatgggcaccaatgtgatcgtggccaacacaatgcccacccacctgagcaacggccagatgtgcgagtggcccagacctagaggacaggccgccacacctgagacacctcagccttctccacctggcggctctggcagcgagccttacaaactgctgcctggcgctgtggccaccatcgtgaaacctctgagcgccatcccccagcccaccatcaccaagcaggaagtgatctgaggactagtccctgttcccagagcccacttttttttctttttttgaaataaaatagcctgtctttcagatctaaaaaaaaaaaaaaaaaaaaaaaaaaaaaaaaaaaaaaaaaaaaaaaaaaaaaaaaaaaaaaaaaaaaaaaaaaaaaaaaaaaaaaaaaaaaaaaaaaaa

SEQ ID NO: 5533 - RNA, 1562 nt, synthetic construct
  misc_feature 1..1562: note = mRNA a-1 (A100) (opt29) from Homo sapiens__NP_000448.3__HNF4A(39-474)(K447R_K470R)
  source 1..1562: mol_type = other RNA
aggagagtcccgcagtcggcgtccagcggctctgcttgttcgtgtgtgtgtcgttgcaggccttattcaagcttaccatggacaccagccctagcgagggcaccaacctgaacgcccctaatagcctgggagtgtccgccctgtgtgccatctgtggcgatagagccaccggcaagcactacggcgccagctcttgtgatggctgcaagggcttcttccggcggagcgtgcggaagaaccacatgtacagctgccggttcagccggcagtgcgtggtggacaaggataagcggaaccagtgccggtactgcagactgaagaagtgcttcagagccggcatgaagaaagaagccgtgcagaacgagcgggaccggatcagcaccagaagaagcagctacgaggacagcagcctgcccagcatcaacgccctgctgcaggccgaggtgctgagcagacagatcaccagcccagtgtccggcatcaacggcgacatccgggccaagaagatcgccagcattgccgacgtgtgcgagagcatgaaggaacagctgctggtgctggtggaatgggccaagtacatccccgccttttgcgagctgcccctggacgatcaggtggccctgctgagagcacacgccggcgaacatctgctgctgggagccaccaagcggagcatggtgttcaaggacgtgctgctgctgggcaacgactacatcgtgcccagacactgccctgagctggccgagatgagccgggtgtccatcagaatcctggacgaactggtgctgccgtttcaggaactgcagatcgacgacaacgagtacgcctacctgaaggccatcatctttttcgaccccgacgccaagggcctgagcgaccctggcaagatcaagcggctgagaagccaggtgcaagtgtccctggaagattacatcaacgaccggcagtacgacagccggggcagatttggcgaactgctcctgctgctgcccaccctgcagagcatcacctggcagatgatcgagcagatccagttcatcaagctgttcggcatggccaagatcgacaatctgctgcaggaaatgctgctcgggggcagcccttctgatgcccctcatgcccaccaccctctgcaccctcacctgatgcaagaacacatgggcaccaatgtgatcgtggccaacacaatgcccacccacctgagcaacggccagatgtgcgagtggcccagacctagaggacaggccgccacacctgagacacctcagccttctccacctggcggctctggcagcgagccttaccggctgctgcctggcgctgtggccaccatcgtgaaacctctgagcgccatcccccagcccaccatcacccggcaggaagtgatctgaggactagtccctgttcccagagcccacttttttttctttttttgaaataaaatagcctgtctttcagatctaaaaaaaaaaaaaaaaaaaaaaaaaaaaaaaaaaaaaaaaaaaaaaaaaaaaaaaaaaaaaaaaaaaaaaaaaaaaaaaaaaaaaaaaaaaaaaaaaaaa

SEQ ID NO: 5534 - RNA, 1562 nt, synthetic construct
  misc_feature 1..1562: note = mRNA a-1 (A100) (opt29) from Homo sapiens__NP_000448.3__HNF4A(39-474)(K458R)
  source 1..1562: mol_type = other RNA
aggagagtcccgcagtcggcgtccagcggctctgcttgttcgtgtgtgtgtcgttgcaggccttattcaagcttaccatggacaccagccctagcgagggcaccaacctgaacgcccctaatagcctgggagtgtccgccctgtgtgccatctgtggcgatagagccaccggcaagcactacggcgccagctcttgtgatggctgcaagggcttcttccggcggagcgtgcggaagaaccacatgtacagctgccggttcagccggcagtgcgtggtggacaaggataagcggaaccagtgccggtactgcagactgaagaagtgcttcagagccggcatgaagaaagaagccgtgcagaacgagcgggaccggatcagcaccagaagaagcagctacgaggacagcagcctgcccagcatcaacgccctgctgcaggccgaggtgctgagcagacagatcaccagcccagtgtccggcatcaacggcgacatccgggccaagaagatcgccagcattgccgacgtgtgcgagagcatgaaggaacagctgctggtgctggtggaatgggccaagtacatccccgccttttgcgagctgcccctggacgatcaggtggccctgctgagagcacacgccggcgaacatctgctgctgggagccaccaagcggagcatggtgttcaaggacgtgctgctgctgggcaacgactacatcgtgcccagacactgccctgagctggccgagatgagccgggtgtccatcagaatcctggacgaactggtgctgccgtttcaggaactgcagatcgacgacaacgagtacgcctacctgaaggccatcatctttttcgaccccgacgccaagggcctgagcgaccctggcaagatcaagcggctgagaagccaggtgcaagtgtccctggaagattacatcaacgaccggcagtacgacagccggggcagatttggcgaactgctcctgctgctgcccaccctgcagagcatcacctggcagatgatcgagcagatccagttcatcaagctgttcggcatggccaagatcgacaatctgctgcaggaaatgctgctcgggggcagcccttctgatgcccctcatgcccaccaccctctgcaccctcacctgatgcaagaacacatgggcaccaatgtgatcgtggccaacacaatgcccacccacctgagcaacggccagatgtgcgagtggcccagacctagaggacaggccgccacacctgagacacctcagccttctccacctggcggctctggcagcgagccttacaaactgctgcctggcgctgtggccaccatcgtgagacctctgagcgccatcccccagcccaccatcaccaagcaggaagtgatctgaggactagtccctgttcccagagcccacttttttttctttttttgaaataaaatagcctgtctttcagatctaaaaaaaaaaaaaaaaaaaaaaaaaaaaaaaaaaaaaaaaaaaaaaaaaaaaaaaaaaaaaaaaaaaaaaaaaaaaaaaaaaaaaaaaaaaaaaaaaaaa

SEQ ID NO: 5535 - RNA, 1562 nt, synthetic construct
  misc_feature 1..1562: note = mRNA a-1 (A100) (opt29) from Homo sapiens__NP_000448.3__HNF4A(39-474)(K106R_K108R_K126R_K127R )
  source 1..1562: mol_type = other RNA
aggagagtcccgcagtcggcgtccagcggctctgcttgttcgtgtgtgtgtcgttgcaggccttattcaagcttaccatggacaccagccctagcgagggcaccaacctgaacgcccctaatagcctgggagtgtccgccctgtgtgccatctgtggcgatagagccaccggcaagcactacggcgccagctcttgtgatggctgcaagggcttcttccggcggagcgtgcggaagaaccacatgtacagctgccggttcagccggcagtgcgtggtggaccgggatagacggaaccagtgccggtactgcagactgaagaagtgcttcagagccggcatgcggagagaagccgtgcagaacgagcgggaccggatcagcaccagaagaagcagctacgaggacagcagcctgcccagcatcaacgccctgctgcaggccgaggtgctgagcagacagatcaccagcccagtgtccggcatcaacggcgacatccgggccaagaagatcgccagcattgccgacgtgtgcgagagcatgaaggaacagctgctggtgctggtggaatgggccaagtacatccccgccttttgcgagctgcccctggacgatcaggtggccctgctgagagcacacgccggcgaacatctgctgctgggagccaccaagcggagcatggtgttcaaggacgtgctgctgctgggcaacgactacatcgtgcccagacactgccctgagctggccgagatgagccgggtgtccatcagaatcctggacgaactggtgctgccgtttcaggaactgcagatcgacgacaacgagtacgcctacctgaaggccatcatctttttcgaccccgacgccaagggcctgagcgaccctggcaagatcaagcggctgagaagccaggtgcaagtgtccctggaagattacatcaacgaccggcagtacgacagccggggcagatttggcgaactgctcctgctgctgcccaccctgcagagcatcacctggcagatgatcgagcagatccagttcatcaagctgttcggcatggccaagatcgacaatctgctgcaggaaatgctgctcgggggcagcccttctgatgcccctcatgcccaccaccctctgcaccctcacctgatgcaagaacacatgggcaccaatgtgatcgtggccaacacaatgcccacccacctgagcaacggccagatgtgcgagtggcccagacctagaggacaggccgccacacctgagacacctcagccttctccacctggcggctctggcagcgagccttacaaactgctgcctggcgctgtggccaccatcgtgaaacctctgagcgccatcccccagcccaccatcaccaagcaggaagtgatctgaggactagtccctgttcccagagcccacttttttttctttttttgaaataaaatagcctgtctttcagatctaaaaaaaaaaaaaaaaaaaaaaaaaaaaaaaaaaaaaaaaaaaaaaaaaaaaaaaaaaaaaaaaaaaaaaaaaaaaaaaaaaaaaaaaaaaaaaaaaaaa

SEQ ID NO: 5536 - RNA, 1562 nt, synthetic construct
  misc_feature 1..1562: note = mRNA a-1 (A100) (opt29) from Homo sapiens__NP_000448.3__HNF4A(39-474)(E285Q)
  source 1..1562: mol_type = other RNA
aggagagtcccgcagtcggcgtccagcggctctgcttgttcgtgtgtgtgtcgttgcaggccttattcaagcttaccatggacaccagccctagcgagggcaccaacctgaacgcccctaatagcctgggagtgtccgccctgtgtgccatctgtggcgatagagccaccggcaagcactacggcgccagctcttgtgatggctgcaagggcttcttccggcggagcgtgcggaagaaccacatgtacagctgccggttcagccggcagtgcgtggtggacaaggataagcggaaccagtgccggtactgcagactgaagaagtgcttcagagccggcatgaagaaagaagccgtgcagaacgagcgggaccggatcagcaccagaagaagcagctacgaggacagcagcctgcccagcatcaacgccctgctgcaggccgaggtgctgagcagacagatcaccagcccagtgtccggcatcaacggcgacatccgggccaagaagatcgccagcattgccgacgtgtgcgagagcatgaaggaacagctgctggtgctggtggaatgggccaagtacatccccgccttttgcgagctgcccctggacgatcaggtggccctgctgagagcacacgccggcgaacatctgctgctgggagccaccaagcggagcatggtgttcaaggacgtgctgctgctgggcaacgactacatcgtgcccagacactgccctgagctggccgagatgagccgggtgtccatcagaatcctggacgaactggtgctgccgtttcaggaactgcagatcgacgacaaccagtacgcctacctgaaggccatcatctttttcgaccccgacgccaagggcctgagcgaccctggcaagatcaagcggctgagaagccaggtgcaagtgtccctggaagattacatcaacgaccggcagtacgacagccggggcagatttggcgaactgctcctgctgctgcccaccctgcagagcatcacctggcagatgatcgagcagatccagttcatcaagctgttcggcatggccaagatcgacaatctgctgcaggaaatgctgctcgggggcagcccttctgatgcccctcatgcccaccaccctctgcaccctcacctgatgcaagaacacatgggcaccaatgtgatcgtggccaacacaatgcccacccacctgagcaacggccagatgtgcgagtggcccagacctagaggacaggccgccacacctgagacacctcagccttctccacctggcggctctggcagcgagccttacaaactgctgcctggcgctgtggccaccatcgtgaaacctctgagcgccatcccccagcccaccatcaccaagcaggaagtgatctgaggactagtccctgttcccagagcccacttttttttctttttttgaaataaaatagcctgtctttcagatctaaaaaaaaaaaaaaaaaaaaaaaaaaaaaaaaaaaaaaaaaaaaaaaaaaaaaaaaaaaaaaaaaaaaaaaaaaaaaaaaaaaaaaaaaaaaaaaaaaaa

SEQ ID NO: 5537 - RNA, 1562 nt, synthetic construct
  misc_feature 1..1562: note = mRNA a-1 (A100) (opt29) from Homo sapiens__NP_000448.3__HNF4A(39-474)(T166E)
  source 1..1562: mol_type = other RNA
aggagagtcccgcagtcggcgtccagcggctctgcttgttcgtgtgtgtgtcgttgcaggccttattcaagcttaccatggacaccagccctagcgagggcaccaacctgaacgcccctaatagcctgggagtgtccgccctgtgtgccatctgtggcgatagagccaccggcaagcactacggcgccagctcttgtgatggctgcaagggcttcttccggcggagcgtgcggaagaaccacatgtacagctgccggttcagccggcagtgcgtggtggacaaggataagcggaaccagtgccggtactgcagactgaagaagtgcttcagagccggcatgaagaaagaagccgtgcagaacgagcgggaccggatcagcaccagaagaagcagctacgaggacagcagcctgcccagcatcaacgccctgctgcaggccgaggtgctgagcagacagatcgagagcccagtgtccggcatcaacggcgacatccgggccaagaagatcgccagcattgccgacgtgtgcgagagcatgaaggaacagctgctggtgctggtggaatgggccaagtacatccccgccttttgcgagctgcccctggacgatcaggtggccctgctgagagcacacgccggcgaacatctgctgctgggagccaccaagcggagcatggtgttcaaggacgtgctgctgctgggcaacgactacatcgtgcccagacactgccctgagctggccgagatgagccgggtgtccatcagaatcctggacgaactggtgctgccgtttcaggaactgcagatcgacgacaacgagtacgcctacctgaaggccatcatctttttcgaccccgacgccaagggcctgagcgaccctggcaagatcaagcggctgagaagccaggtgcaagtgtccctggaagattacatcaacgaccggcagtacgacagccggggcagatttggcgaactgctcctgctgctgcccaccctgcagagcatcacctggcagatgatcgagcagatccagttcatcaagctgttcggcatggccaagatcgacaatctgctgcaggaaatgctgctcgggggcagcccttctgatgcccctcatgcccaccaccctctgcaccctcacctgatgcaagaacacatgggcaccaatgtgatcgtggccaacacaatgcccacccacctgagcaacggccagatgtgcgagtggcccagacctagaggacaggccgccacacctgagacacctcagccttctccacctggcggctctggcagcgagccttacaaactgctgcctggcgctgtggccaccatcgtgaaacctctgagcgccatcccccagcccaccatcaccaagcaggaagtgatctgaggactagtccctgttcccagagcccacttttttttctttttttgaaataaaatagcctgtctttcagatctaaaaaaaaaaaaaaaaaaaaaaaaaaaaaaaaaaaaaaaaaaaaaaaaaaaaaaaaaaaaaaaaaaaaaaaaaaaaaaaaaaaaaaaaaaaaaaaaaaaa

SEQ ID NO: 5538 - RNA, 1562 nt, synthetic construct
  misc_feature 1..1562: note = mRNA a-1 (A100) (opt29) from Homo sapiens__NP_000448.3__HNF4A(39-474)(S148A)
  source 1..1562: mol_type = other RNA
aggagagtcccgcagtcggcgtccagcggctctgcttgttcgtgtgtgtgtcgttgcaggccttattcaagcttaccatggacaccagccctagcgagggcaccaacctgaacgcccctaatagcctgggagtgtccgccctgtgtgccatctgtggcgatagagccaccggcaagcactacggcgccagctcttgtgatggctgcaagggcttcttccggcggagcgtgcggaagaaccacatgtacagctgccggttcagccggcagtgcgtggtggacaaggataagcggaaccagtgccggtactgcagactgaagaagtgcttcagagccggcatgaagaaagaagccgtgcagaacgagcgggaccggatcagcaccagaagaagcagctacgaggacagcgccctgcccagcatcaacgccctgctgcaggccgaggtgctgagcagacagatcaccagcccagtgtccggcatcaacggcgacatccgggccaagaagatcgccagcattgccgacgtgtgcgagagcatgaaggaacagctgctggtgctggtggaatgggccaagtacatccccgccttttgcgagctgcccctggacgatcaggtggccctgctgagagcacacgccggcgaacatctgctgctgggagccaccaagcggagcatggtgttcaaggacgtgctgctgctgggcaacgactacatcgtgcccagacactgccctgagctggccgagatgagccgggtgtccatcagaatcctggacgaactggtgctgccgtttcaggaactgcagatcgacgacaacgagtacgcctacctgaaggccatcatctttttcgaccccgacgccaagggcctgagcgaccctggcaagatcaagcggctgagaagccaggtgcaagtgtccctggaagattacatcaacgaccggcagtacgacagccggggcagatttggcgaactgctcctgctgctgcccaccctgcagagcatcacctggcagatgatcgagcagatccagttcatcaagctgttcggcatggccaagatcgacaatctgctgcaggaaatgctgctcgggggcagcccttctgatgcccctcatgcccaccaccctctgcaccctcacctgatgcaagaacacatgggcaccaatgtgatcgtggccaacacaatgcccacccacctgagcaacggccagatgtgcgagtggcccagacctagaggacaggccgccacacctgagacacctcagccttctccacctggcggctctggcagcgagccttacaaactgctgcctggcgctgtggccaccatcgtgaaacctctgagcgccatcccccagcccaccatcaccaagcaggaagtgatctgaggactagtccctgttcccagagcccacttttttttctttttttgaaataaaatagcctgtctttcagatctaaaaaaaaaaaaaaaaaaaaaaaaaaaaaaaaaaaaaaaaaaaaaaaaaaaaaaaaaaaaaaaaaaaaaaaaaaaaaaaaaaaaaaaaaaaaaaaaaaaa

SEQ ID NO: 5539 - RNA, 1562 nt, synthetic construct
  misc_feature 1..1562: note = mRNA a-1 (A100) (opt29) from Homo sapiens__NP_000448.3__HNF4A(39-474)(S148E)
  source 1..1562: mol_type = other RNA
aggagagtcccgcagtcggcgtccagcggctctgcttgttcgtgtgtgtgtcgttgcaggccttattcaagcttaccatggacaccagccctagcgagggcaccaacctgaacgcccctaatagcctgggagtgtccgccctgtgtgccatctgtggcgatagagccaccggcaagcactacggcgccagctcttgtgatggctgcaagggcttcttccggcggagcgtgcggaagaaccacatgtacagctgccggttcagccggcagtgcgtggtggacaaggataagcggaaccagtgccggtactgcagactgaagaagtgcttcagagccggcatgaagaaagaagccgtgcagaacgagcgggaccggatcagcaccagaagaagcagctacgaggacagcgaactgcccagcatcaacgccctgctgcaggccgaggtgctgagcagacagatcaccagcccagtgtccggcatcaacggcgacatccgggccaagaagatcgccagcattgccgacgtgtgcgagagcatgaaggaacagctgctggtgctggtggaatgggccaagtacatccccgccttttgcgagctgcccctggacgatcaggtggccctgctgagagcacacgccggcgaacatctgctgctgggagccaccaagcggagcatggtgttcaaggacgtgctgctgctgggcaacgactacatcgtgcccagacactgccctgagctggccgagatgagccgggtgtccatcagaatcctggacgaactggtgctgccgtttcaggaactgcagatcgacgacaacgagtacgcctacctgaaggccatcatctttttcgaccccgacgccaagggcctgagcgaccctggcaagatcaagcggctgagaagccaggtgcaagtgtccctggaagattacatcaacgaccggcagtacgacagccggggcagatttggcgaactgctcctgctgctgcccaccctgcagagcatcacctggcagatgatcgagcagatccagttcatcaagctgttcggcatggccaagatcgacaatctgctgcaggaaatgctgctcgggggcagcccttctgatgcccctcatgcccaccaccctctgcaccctcacctgatgcaagaacacatgggcaccaatgtgatcgtggccaacacaatgcccacccacctgagcaacggccagatgtgcgagtggcccagacctagaggacaggccgccacacctgagacacctcagccttctccacctggcggctctggcagcgagccttacaaactgctgcctggcgctgtggccaccatcgtgaaacctctgagcgccatcccccagcccaccatcaccaagcaggaagtgatctgaggactagtccctgttcccagagcccacttttttttctttttttgaaataaaatagcctgtctttcagatctaaaaaaaaaaaaaaaaaaaaaaaaaaaaaaaaaaaaaaaaaaaaaaaaaaaaaaaaaaaaaaaaaaaaaaaaaaaaaaaaaaaaaaaaaaaaaaaaaaaa

SEQ ID NO: 5540 - RNA, 1562 nt, synthetic construct
  misc_feature 1..1562: note = mRNA a-1 (A100) (opt29) from Homo sapiens__NP_000448.3__HNF4A(39-474)(S183A)
  source 1..1562: mol_type = other RNA
aggagagtcccgcagtcggcgtccagcggctctgcttgttcgtgtgtgtgtcgttgcaggccttattcaagcttaccatggacaccagccctagcgagggcaccaacctgaacgcccctaatagcctgggagtgtccgccctgtgtgccatctgtggcgatagagccaccggcaagcactacggcgccagctcttgtgatggctgcaagggcttcttccggcggagcgtgcggaagaaccacatgtacagctgccggttcagccggcagtgcgtggtggacaaggataagcggaaccagtgccggtactgcagactgaagaagtgcttcagagccggcatgaagaaagaagccgtgcagaacgagcgggaccggatcagcaccagaagaagcagctacgaggacagcagcctgcccagcatcaacgccctgctgcaggccgaggtgctgagcagacagatcaccagcccagtgtccggcatcaacggcgacatccgggccaagaagatcgccgccattgccgacgtgtgcgagagcatgaaggaacagctgctggtgctggtggaatgggccaagtacatccccgccttttgcgagctgcccctggacgatcaggtggccctgctgagagcacacgccggcgaacatctgctgctgggagccaccaagcggagcatggtgttcaaggacgtgctgctgctgggcaacgactacatcgtgcccagacactgccctgagctggccgagatgagccgggtgtccatcagaatcctggacgaactggtgctgccgtttcaggaactgcagatcgacgacaacgagtacgcctacctgaaggccatcatctttttcgaccccgacgccaagggcctgagcgaccctggcaagatcaagcggctgagaagccaggtgcaagtgtccctggaagattacatcaacgaccggcagtacgacagccggggcagatttggcgaactgctcctgctgctgcccaccctgcagagcatcacctggcagatgatcgagcagatccagttcatcaagctgttcggcatggccaagatcgacaatctgctgcaggaaatgctgctcgggggcagcccttctgatgcccctcatgcccaccaccctctgcaccctcacctgatgcaagaacacatgggcaccaatgtgatcgtggccaacacaatgcccacccacctgagcaacggccagatgtgcgagtggcccagacctagaggacaggccgccacacctgagacacctcagccttctccacctggcggctctggcagcgagccttacaaactgctgcctggcgctgtggccaccatcgtgaaacctctgagcgccatcccccagcccaccatcaccaagcaggaagtgatctgaggactagtccctgttcccagagcccacttttttttctttttttgaaataaaatagcctgtctttcagatctaaaaaaaaaaaaaaaaaaaaaaaaaaaaaaaaaaaaaaaaaaaaaaaaaaaaaaaaaaaaaaaaaaaaaaaaaaaaaaaaaaaaaaaaaaaaaaaaaaaa

SEQ ID NO: 5541 - RNA, 1562 nt, synthetic construct
  misc_feature 1..1562: note = mRNA a-1 (A100) (opt29) from Homo sapiens__NP_000448.3__HNF4A(39-474)(S183E)
  source 1..1562: mol_type = other RNA
aggagagtcccgcagtcggcgtccagcggctctgcttgttcgtgtgtgtgtcgttgcaggccttattcaagcttaccatggacaccagccctagcgagggcaccaacctgaacgcccctaatagcctgggagtgtccgccctgtgtgccatctgtggcgatagagccaccggcaagcactacggcgccagctcttgtgatggctgcaagggcttcttccggcggagcgtgcggaagaaccacatgtacagctgccggttcagccggcagtgcgtggtggacaaggataagcggaaccagtgccggtactgcagactgaagaagtgcttcagagccggcatgaagaaagaagccgtgcagaacgagcgggaccggatcagcaccagaagaagcagctacgaggacagcagcctgcccagcatcaacgccctgctgcaggccgaggtgctgagcagacagatcaccagcccagtgtccggcatcaacggcgacatccgggccaagaagatcgccgagattgccgacgtgtgcgagagcatgaaggaacagctgctggtgctggtggaatgggccaagtacatccccgccttttgcgagctgcccctggacgatcaggtggccctgctgagagcacacgccggcgaacatctgctgctgggagccaccaagcggagcatggtgttcaaggacgtgctgctgctgggcaacgactacatcgtgcccagacactgccctgagctggccgagatgagccgggtgtccatcagaatcctggacgaactggtgctgccgtttcaggaactgcagatcgacgacaacgagtacgcctacctgaaggccatcatctttttcgaccccgacgccaagggcctgagcgaccctggcaagatcaagcggctgagaagccaggtgcaagtgtccctggaagattacatcaacgaccggcagtacgacagccggggcagatttggcgaactgctcctgctgctgcccaccctgcagagcatcacctggcagatgatcgagcagatccagttcatcaagctgttcggcatggccaagatcgacaatctgctgcaggaaatgctgctcgggggcagcccttctgatgcccctcatgcccaccaccctctgcaccctcacctgatgcaagaacacatgggcaccaatgtgatcgtggccaacacaatgcccacccacctgagcaacggccagatgtgcgagtggcccagacctagaggacaggccgccacacctgagacacctcagccttctccacctggcggctctggcagcgagccttacaaactgctgcctggcgctgtggccaccatcgtgaaacctctgagcgccatcccccagcccaccatcaccaagcaggaagtgatctgaggactagtccctgttcccagagcccacttttttttctttttttgaaataaaatagcctgtctttcagatctaaaaaaaaaaaaaaaaaaaaaaaaaaaaaaaaaaaaaaaaaaaaaaaaaaaaaaaaaaaaaaaaaaaaaaaaaaaaaaaaaaaaaaaaaaaaaaaaaaaa

SEQ ID NO: 5542 - RNA, 1562 nt, synthetic construct
  misc_feature 1..1562: note = mRNA a-1 (A100) (opt29) from Homo sapiens__NP_000448.3__HNF4A(39-474)(S461A)
  source 1..1562: mol_type = other RNA
aggagagtcccgcagtcggcgtccagcggctctgcttgttcgtgtgtgtgtcgttgcaggccttattcaagcttaccatggacaccagccctagcgagggcaccaacctgaacgcccctaatagcctgggagtgtccgccctgtgtgccatctgtggcgatagagccaccggcaagcactacggcgccagctcttgtgatggctgcaagggcttcttccggcggagcgtgcggaagaaccacatgtacagctgccggttcagccggcagtgcgtggtggacaaggataagcggaaccagtgccggtactgcagactgaagaagtgcttcagagccggcatgaagaaagaagccgtgcagaacgagcgggaccggatcagcaccagaagaagcagctacgaggacagcagcctgcccagcatcaacgccctgctgcaggccgaggtgctgagcagacagatcaccagcccagtgtccggcatcaacggcgacatccgggccaagaagatcgccagcattgccgacgtgtgcgagagcatgaaggaacagctgctggtgctggtggaatgggccaagtacatccccgccttttgcgagctgcccctggacgatcaggtggccctgctgagagcacacgccggcgaacatctgctgctgggagccaccaagcggagcatggtgttcaaggacgtgctgctgctgggcaacgactacatcgtgcccagacactgccctgagctggccgagatgagccgggtgtccatcagaatcctggacgaactggtgctgccgtttcaggaactgcagatcgacgacaacgagtacgcctacctgaaggccatcatctttttcgaccccgacgccaagggcctgagcgaccctggcaagatcaagcggctgagaagccaggtgcaagtgtccctggaagattacatcaacgaccggcagtacgacagccggggcagatttggcgaactgctcctgctgctgcccaccctgcagagcatcacctggcagatgatcgagcagatccagttcatcaagctgttcggcatggccaagatcgacaatctgctgcaggaaatgctgctcgggggcagcccttctgatgcccctcatgcccaccaccctctgcaccctcacctgatgcaagaacacatgggcaccaatgtgatcgtggccaacacaatgcccacccacctgagcaacggccagatgtgcgagtggcccagacctagaggacaggccgccacacctgagacacctcagccttctccacctggcggctctggcagcgagccttacaaactgctgcctggcgctgtggccaccatcgtgaaacctctggccgccatcccccagcccaccatcaccaagcaggaagtgatctgaggactagtccctgttcccagagcccacttttttttctttttttgaaataaaatagcctgtctttcagatctaaaaaaaaaaaaaaaaaaaaaaaaaaaaaaaaaaaaaaaaaaaaaaaaaaaaaaaaaaaaaaaaaaaaaaaaaaaaaaaaaaaaaaaaaaaaaaaaaaaa

SEQ ID NO: 5543 - RNA, 1562 nt, synthetic construct
  misc_feature 1..1562: note = mRNA a-1 (A100) (opt29) from Homo sapiens__NP_000448.3__HNF4A(39-474)(S461E)
  source 1..1562: mol_type = other RNA
aggagagtcccgcagtcggcgtccagcggctctgcttgttcgtgtgtgtgtcgttgcaggccttattcaagcttaccatggacaccagccctagcgagggcaccaacctgaacgcccctaatagcctgggagtgtccgccctgtgtgccatctgtggcgatagagccaccggcaagcactacggcgccagctcttgtgatggctgcaagggcttcttccggcggagcgtgcggaagaaccacatgtacagctgccggttcagccggcagtgcgtggtggacaaggataagcggaaccagtgccggtactgcagactgaagaagtgcttcagagccggcatgaagaaagaagccgtgcagaacgagcgggaccggatcagcaccagaagaagcagctacgaggacagcagcctgcccagcatcaacgccctgctgcaggccgaggtgctgagcagacagatcaccagcccagtgtccggcatcaacggcgacatccgggccaagaagatcgccagcattgccgacgtgtgcgagagcatgaaggaacagctgctggtgctggtggaatgggccaagtacatccccgccttttgcgagctgcccctggacgatcaggtggccctgctgagagcacacgccggcgaacatctgctgctgggagccaccaagcggagcatggtgttcaaggacgtgctgctgctgggcaacgactacatcgtgcccagacactgccctgagctggccgagatgagccgggtgtccatcagaatcctggacgaactggtgctgccgtttcaggaactgcagatcgacgacaacgagtacgcctacctgaaggccatcatctttttcgaccccgacgccaagggcctgagcgaccctggcaagatcaagcggctgagaagccaggtgcaagtgtccctggaagattacatcaacgaccggcagtacgacagccggggcagatttggcgaactgctcctgctgctgcccaccctgcagagcatcacctggcagatgatcgagcagatccagttcatcaagctgttcggcatggccaagatcgacaatctgctgcaggaaatgctgctcgggggcagcccttctgatgcccctcatgcccaccaccctctgcaccctcacctgatgcaagaacacatgggcaccaatgtgatcgtggccaacacaatgcccacccacctgagcaacggccagatgtgcgagtggcccagacctagaggacaggccgccacacctgagacacctcagccttctccacctggcggctctggcagcgagccttacaaactgctgcctggcgctgtggccaccatcgtgaaacctctggaggccatcccccagcccaccatcaccaagcaggaagtgatctgaggactagtccctgttcccagagcccacttttttttctttttttgaaataaaatagcctgtctttcagatctaaaaaaaaaaaaaaaaaaaaaaaaaaaaaaaaaaaaaaaaaaaaaaaaaaaaaaaaaaaaaaaaaaaaaaaaaaaaaaaaaaaaaaaaaaaaaaaaaaaa

SEQ ID NO: 5544 - RNA, 1562 nt, synthetic construct
  misc_feature 1..1562: note = mRNA a-1 (A100) (opt29) from Homo sapiens__NP_000448.3__HNF4A(39-474)(S142A_S143A_S313A)
  source 1..1562: mol_type = other RNA
aggagagtcccgcagtcggcgtccagcggctctgcttgttcgtgtgtgtgtcgttgcaggccttattcaagcttaccatggacaccagccctagcgagggcaccaacctgaacgcccctaatagcctgggagtgtccgccctgtgtgccatctgtggcgatagagccaccggcaagcactacggcgccagctcttgtgatggctgcaagggcttcttccggcggagcgtgcggaagaaccacatgtacagctgccggttcagccggcagtgcgtggtggacaaggataagcggaaccagtgccggtactgcagactgaagaagtgcttcagagccggcatgaagaaagaagccgtgcagaacgagcgggaccggatcagcaccagaagagccgcctacgaggacagcagcctgcccagcatcaacgccctgctgcaggccgaggtgctgagcagacagatcaccagcccagtgtccggcatcaacggcgacatccgggccaagaagatcgccagcattgccgacgtgtgcgagagcatgaaggaacagctgctggtgctggtggaatgggccaagtacatccccgccttttgcgagctgcccctggacgatcaggtggccctgctgagagcacacgccggcgaacatctgctgctgggagccaccaagcggagcatggtgttcaaggacgtgctgctgctgggcaacgactacatcgtgcccagacactgccctgagctggccgagatgagccgggtgtccatcagaatcctggacgaactggtgctgccgtttcaggaactgcagatcgacgacaacgagtacgcctacctgaaggccatcatctttttcgaccccgacgccaagggcctgagcgaccctggcaagatcaagcggctgagagcccaggtgcaagtgtccctggaagattacatcaacgaccggcagtacgacagccggggcagatttggcgaactgctcctgctgctgcccaccctgcagagcatcacctggcagatgatcgagcagatccagttcatcaagctgttcggcatggccaagatcgacaatctgctgcaggaaatgctgctcgggggcagcccttctgatgcccctcatgcccaccaccctctgcaccctcacctgatgcaagaacacatgggcaccaatgtgatcgtggccaacacaatgcccacccacctgagcaacggccagatgtgcgagtggcccagacctagaggacaggccgccacacctgagacacctcagccttctccacctggcggctctggcagcgagccttacaaactgctgcctggcgctgtggccaccatcgtgaaacctctgagcgccatcccccagcccaccatcaccaagcaggaagtgatctgaggactagtccctgttcccagagcccacttttttttctttttttgaaataaaatagcctgtctttcagatctaaaaaaaaaaaaaaaaaaaaaaaaaaaaaaaaaaaaaaaaaaaaaaaaaaaaaaaaaaaaaaaaaaaaaaaaaaaaaaaaaaaaaaaaaaaaaaaaaaaa

SEQ ID NO: 5545 - RNA, 1562 nt, synthetic construct
  misc_feature 1..1562: note = mRNA a-1 (A100) (opt29) from Homo sapiens__NP_000448.3__HNF4A(39-474)(S142A_S143A_S313A_K458R )
  source 1..1562: mol_type = other RNA
aggagagtcccgcagtcggcgtccagcggctctgcttgttcgtgtgtgtgtcgttgcaggccttattcaagcttaccatggacaccagccctagcgagggcaccaacctgaacgcccctaatagcctgggagtgtccgccctgtgtgccatctgtggcgatagagccaccggcaagcactacggcgccagctcttgtgatggctgcaagggcttcttccggcggagcgtgcggaagaaccacatgtacagctgccggttcagccggcagtgcgtggtggacaaggataagcggaaccagtgccggtactgcagactgaagaagtgcttcagagccggcatgaagaaagaagccgtgcagaacgagcgggaccggatcagcaccagaagagccgcctacgaggacagcagcctgcccagcatcaacgccctgctgcaggccgaggtgctgagcagacagatcaccagcccagtgtccggcatcaacggcgacatccgggccaagaagatcgccagcattgccgacgtgtgcgagagcatgaaggaacagctgctggtgctggtggaatgggccaagtacatccccgccttttgcgagctgcccctggacgatcaggtggccctgctgagagcacacgccggcgaacatctgctgctgggagccaccaagcggagcatggtgttcaaggacgtgctgctgctgggcaacgactacatcgtgcccagacactgccctgagctggccgagatgagccgggtgtccatcagaatcctggacgaactggtgctgccgtttcaggaactgcagatcgacgacaacgagtacgcctacctgaaggccatcatctttttcgaccccgacgccaagggcctgagcgaccctggcaagatcaagcggctgagagcccaggtgcaagtgtccctggaagattacatcaacgaccggcagtacgacagccggggcagatttggcgaactgctcctgctgctgcccaccctgcagagcatcacctggcagatgatcgagcagatccagttcatcaagctgttcggcatggccaagatcgacaatctgctgcaggaaatgctgctcgggggcagcccttctgatgcccctcatgcccaccaccctctgcaccctcacctgatgcaagaacacatgggcaccaatgtgatcgtggccaacacaatgcccacccacctgagcaacggccagatgtgcgagtggcccagacctagaggacaggccgccacacctgagacacctcagccttctccacctggcggctctggcagcgagccttacaaactgctgcctggcgctgtggccaccatcgtgagacctctgagcgccatcccccagcccaccatcaccaagcaggaagtgatctgaggactagtccctgttcccagagcccacttttttttctttttttgaaataaaatagcctgtctttcagatctaaaaaaaaaaaaaaaaaaaaaaaaaaaaaaaaaaaaaaaaaaaaaaaaaaaaaaaaaaaaaaaaaaaaaaaaaaaaaaaaaaaaaaaaaaaaaaaaaaaa

SEQ ID NO: 5546 - RNA, 1562 nt, synthetic construct
  misc_feature 1..1562: note = mRNA a-1 (A100) (opt29) from Homo sapiens__NP_000448.3__HNF4A(39-474)(S142A_S143A_S167A_S313A _S378A_T429A_T432A_S436A_K458R)
  source 1..1562: mol_type = other RNA
aggagagtcccgcagtcggcgtccagcggctctgcttgttcgtgtgtgtgtcgttgcaggccttattcaagcttaccatggacaccagccctagcgagggcaccaacctgaacgcccctaatagcctgggagtgtccgccctgtgtgccatctgtggcgatagagccaccggcaagcactacggcgccagctcttgtgatggctgcaagggcttcttccggcggagcgtgcggaagaaccacatgtacagctgccggttcagccggcagtgcgtggtggacaaggataagcggaaccagtgccggtactgcagactgaagaagtgcttcagagccggcatgaagaaagaagccgtgcagaacgagcgggaccggatcagcaccagaagagccgcctacgaggacagcagcctgcccagcatcaacgccctgctgcaggccgaggtgctgagcagacagatcaccgccccagtgtccggcatcaacggcgacatccgggccaagaagatcgccagcattgccgacgtgtgcgagagcatgaaggaacagctgctggtgctggtggaatgggccaagtacatccccgccttttgcgagctgcccctggacgatcaggtggccctgctgagagcacacgccggcgaacatctgctgctgggagccaccaagcggagcatggtgttcaaggacgtgctgctgctgggcaacgactacatcgtgcccagacactgccctgagctggccgagatgagccgggtgtccatcagaatcctggacgaactggtgctgccgtttcaggaactgcagatcgacgacaacgagtacgcctacctgaaggccatcatctttttcgaccccgacgccaagggcctgagcgaccctggcaagatcaagcggctgagagcccaggtgcaagtgtccctggaagattacatcaacgaccggcagtacgacagccggggcagatttggcgaactgctcctgctgctgcccaccctgcagagcatcacctggcagatgatcgagcagatccagttcatcaagctgttcggcatggccaagatcgacaatctgctgcaggaaatgctgctcgggggcgccccttctgatgcccctcatgcccaccaccctctgcaccctcacctgatgcaagaacacatgggcaccaatgtgatcgtggccaacacaatgcccacccacctgagcaacggccagatgtgcgagtggcccagacctagaggacaggccgccgcccctgaggcccctcagcctgccccacctggcggctctggcagcgagccttacaaactgctgcctggcgctgtggccaccatcgtgagacctctgagcgccatcccccagcccaccatcaccaagcaggaagtgatctgaggactagtccctgttcccagagcccacttttttttctttttttgaaataaaatagcctgtctttcagatctaaaaaaaaaaaaaaaaaaaaaaaaaaaaaaaaaaaaaaaaaaaaaaaaaaaaaaaaaaaaaaaaaaaaaaaaaaaaaaaaaaaaaaaaaaaaaaaaaaaa

SEQ ID NO: 5547 - RNA, 1562 nt, synthetic construct
  misc_feature 1..1562: note = mRNA a-1 (A100) (opt29) from Homo sapiens__NP_000448.3__HNF4A(39-474)(S142A_S143A_S148A_S167A _S313A_S378A_T429A_T432A_S436A_K458R)
  source 1..1562: mol_type = other RNA
aggagagtcccgcagtcggcgtccagcggctctgcttgttcgtgtgtgtgtcgttgcaggccttattcaagcttaccatggacaccagccctagcgagggcaccaacctgaacgcccctaatagcctgggagtgtccgccctgtgtgccatctgtggcgatagagccaccggcaagcactacggcgccagctcttgtgatggctgcaagggcttcttccggcggagcgtgcggaagaaccacatgtacagctgccggttcagccggcagtgcgtggtggacaaggataagcggaaccagtgccggtactgcagactgaagaagtgcttcagagccggcatgaagaaagaagccgtgcagaacgagcgggaccggatcagcaccagaagagccgcctacgaggacagcgccctgcccagcatcaacgccctgctgcaggccgaggtgctgagcagacagatcaccgccccagtgtccggcatcaacggcgacatccgggccaagaagatcgccagcattgccgacgtgtgcgagagcatgaaggaacagctgctggtgctggtggaatgggccaagtacatccccgccttttgcgagctgcccctggacgatcaggtggccctgctgagagcacacgccggcgaacatctgctgctgggagccaccaagcggagcatggtgttcaaggacgtgctgctgctgggcaacgactacatcgtgcccagacactgccctgagctggccgagatgagccgggtgtccatcagaatcctggacgaactggtgctgccgtttcaggaactgcagatcgacgacaacgagtacgcctacctgaaggccatcatctttttcgaccccgacgccaagggcctgagcgaccctggcaagatcaagcggctgagagcccaggtgcaagtgtccctggaagattacatcaacgaccggcagtacgacagccggggcagatttggcgaactgctcctgctgctgcccaccctgcagagcatcacctggcagatgatcgagcagatccagttcatcaagctgttcggcatggccaagatcgacaatctgctgcaggaaatgctgctcgggggcgccccttctgatgcccctcatgcccaccaccctctgcaccctcacctgatgcaagaacacatgggcaccaatgtgatcgtggccaacacaatgcccacccacctgagcaacggccagatgtgcgagtggcccagacctagaggacaggccgccgcccctgaggcccctcagcctgccccacctggcggctctggcagcgagccttacaaactgctgcctggcgctgtggccaccatcgtgagacctctgagcgccatcccccagcccaccatcaccaagcaggaagtgatctgaggactagtccctgttcccagagcccacttttttttctttttttgaaataaaatagcctgtctttcagatctaaaaaaaaaaaaaaaaaaaaaaaaaaaaaaaaaaaaaaaaaaaaaaaaaaaaaaaaaaaaaaaaaaaaaaaaaaaaaaaaaaaaaaaaaaaaaaaaaaaa

SEQ ID NO: 5548 - RNA, 1562 nt, synthetic construct
  misc_feature 1..1562: note = mRNA a-1 (A100) (opt29) from Homo sapiens__NP_000448.3__HNF4A(39-474)(K106R_K108R_K126R_K127R _S142A_S143A_S148A_S167A_S313A_S378A_T429A_T432A_S436A_K458 R)
  source 1..1562: mol_type = other RNA
aggagagtcccgcagtcggcgtccagcggctctgcttgttcgtgtgtgtgtcgttgcaggccttattcaagcttaccatggacaccagccctagcgagggcaccaacctgaacgcccctaatagcctgggagtgtccgccctgtgtgccatctgtggcgatagagccaccggcaagcactacggcgccagctcttgtgatggctgcaagggcttcttccggcggagcgtgcggaagaaccacatgtacagctgccggttcagccggcagtgcgtggtggaccgggatagacggaaccagtgccggtactgcagactgaagaagtgcttcagagccggcatgcggagagaagccgtgcagaacgagcgggaccggatcagcaccagaagagccgcctacgaggacagcgccctgcccagcatcaacgccctgctgcaggccgaggtgctgagcagacagatcaccgccccagtgtccggcatcaacggcgacatccgggccaagaagatcgccagcattgccgacgtgtgcgagagcatgaaggaacagctgctggtgctggtggaatgggccaagtacatccccgccttttgcgagctgcccctggacgatcaggtggccctgctgagagcacacgccggcgaacatctgctgctgggagccaccaagcggagcatggtgttcaaggacgtgctgctgctgggcaacgactacatcgtgcccagacactgccctgagctggccgagatgagccgggtgtccatcagaatcctggacgaactggtgctgccgtttcaggaactgcagatcgacgacaacgagtacgcctacctgaaggccatcatctttttcgaccccgacgccaagggcctgagcgaccctggcaagatcaagcggctgagagcccaggtgcaagtgtccctggaagattacatcaacgaccggcagtacgacagccggggcagatttggcgaactgctcctgctgctgcccaccctgcagagcatcacctggcagatgatcgagcagatccagttcatcaagctgttcggcatggccaagatcgacaatctgctgcaggaaatgctgctcgggggcgccccttctgatgcccctcatgcccaccaccctctgcaccctcacctgatgcaagaacacatgggcaccaatgtgatcgtggccaacacaatgcccacccacctgagcaacggccagatgtgcgagtggcccagacctagaggacaggccgccgcccctgaggcccctcagcctgccccacctggcggctctggcagcgagccttacaaactgctgcctggcgctgtggccaccatcgtgagacctctgagcgccatcccccagcccaccatcaccaagcaggaagtgatctgaggactagtccctgttcccagagcccacttttttttctttttttgaaataaaatagcctgtctttcagatctaaaaaaaaaaaaaaaaaaaaaaaaaaaaaaaaaaaaaaaaaaaaaaaaaaaaaaaaaaaaaaaaaaaaaaaaaaaaaaaaaaaaaaaaaaaaaaaaaaaa

SEQ ID NO: 5549 - RNA, 1562 nt, synthetic construct
  misc_feature 1..1562: note = mRNA a-1 (A100) (opt29) from Homo sapiens__NP_000448.3__HNF4A(39-474)(S142A_S143A_S148A_T166A _S167A_S313A_S378A_T429A_T432A_S436A_K458R)
  source 1..1562: mol_type = other RNA
aggagagtcccgcagtcggcgtccagcggctctgcttgttcgtgtgtgtgtcgttgcaggccttattcaagcttaccatggacaccagccctagcgagggcaccaacctgaacgcccctaatagcctgggagtgtccgccctgtgtgccatctgtggcgatagagccaccggcaagcactacggcgccagctcttgtgatggctgcaagggcttcttccggcggagcgtgcggaagaaccacatgtacagctgccggttcagccggcagtgcgtggtggacaaggataagcggaaccagtgccggtactgcagactgaagaagtgcttcagagccggcatgaagaaagaagccgtgcagaacgagcgggaccggatcagcaccagaagagccgcctacgaggacagcgccctgcccagcatcaacgccctgctgcaggccgaggtgctgagcagacagatcgccgccccagtgtccggcatcaacggcgacatccgggccaagaagatcgccagcattgccgacgtgtgcgagagcatgaaggaacagctgctggtgctggtggaatgggccaagtacatccccgccttttgcgagctgcccctggacgatcaggtggccctgctgagagcacacgccggcgaacatctgctgctgggagccaccaagcggagcatggtgttcaaggacgtgctgctgctgggcaacgactacatcgtgcccagacactgccctgagctggccgagatgagccgggtgtccatcagaatcctggacgaactggtgctgccgtttcaggaactgcagatcgacgacaacgagtacgcctacctgaaggccatcatctttttcgaccccgacgccaagggcctgagcgaccctggcaagatcaagcggctgagagcccaggtgcaagtgtccctggaagattacatcaacgaccggcagtacgacagccggggcagatttggcgaactgctcctgctgctgcccaccctgcagagcatcacctggcagatgatcgagcagatccagttcatcaagctgttcggcatggccaagatcgacaatctgctgcaggaaatgctgctcgggggcgccccttctgatgcccctcatgcccaccaccctctgcaccctcacctgatgcaagaacacatgggcaccaatgtgatcgtggccaacacaatgcccacccacctgagcaacggccagatgtgcgagtggcccagacctagaggacaggccgccgcccctgaggcccctcagcctgccccacctggcggctctggcagcgagccttacaaactgctgcctggcgctgtggccaccatcgtgagacctctgagcgccatcccccagcccaccatcaccaagcaggaagtgatctgaggactagtccctgttcccagagcccacttttttttctttttttgaaataaaatagcctgtctttcagatctaaaaaaaaaaaaaaaaaaaaaaaaaaaaaaaaaaaaaaaaaaaaaaaaaaaaaaaaaaaaaaaaaaaaaaaaaaaaaaaaaaaaaaaaaaaaaaaaaaaa

SEQ ID NO: 5550 - RNA, 1562 nt, synthetic construct
  misc_feature 1..1562: note = mRNA a-1 (A100) (opt29) from Homo sapiens__NP_000448.3__HNF4A(39-474)(S87A_S142A_S143A_S148A_ T166A_S167A_S313A_S378A_T429A_T432A_S436A_K458R)
  source 1..1562: mol_type = other RNA
aggagagtcccgcagtcggcgtccagcggctctgcttgttcgtgtgtgtgtcgttgcaggccttattcaagcttaccatggacaccagccctagcgagggcaccaacctgaacgcccctaatagcctgggagtgtccgccctgtgtgccatctgtggcgatagagccaccggcaagcactacggcgccagctcttgtgatggctgcaagggcttcttccggcgggccgtgcggaagaaccacatgtacagctgccggttcagccggcagtgcgtggtggacaaggataagcggaaccagtgccggtactgcagactgaagaagtgcttcagagccggcatgaagaaagaagccgtgcagaacgagcgggaccggatcagcaccagaagagccgcctacgaggacagcgccctgcccagcatcaacgccctgctgcaggccgaggtgctgagcagacagatcgccgccccagtgtccggcatcaacggcgacatccgggccaagaagatcgccagcattgccgacgtgtgcgagagcatgaaggaacagctgctggtgctggtggaatgggccaagtacatccccgccttttgcgagctgcccctggacgatcaggtggccctgctgagagcacacgccggcgaacatctgctgctgggagccaccaagcggagcatggtgttcaaggacgtgctgctgctgggcaacgactacatcgtgcccagacactgccctgagctggccgagatgagccgggtgtccatcagaatcctggacgaactggtgctgccgtttcaggaactgcagatcgacgacaacgagtacgcctacctgaaggccatcatctttttcgaccccgacgccaagggcctgagcgaccctggcaagatcaagcggctgagagcccaggtgcaagtgtccctggaagattacatcaacgaccggcagtacgacagccggggcagatttggcgaactgctcctgctgctgcccaccctgcagagcatcacctggcagatgatcgagcagatccagttcatcaagctgttcggcatggccaagatcgacaatctgctgcaggaaatgctgctcgggggcgccccttctgatgcccctcatgcccaccaccctctgcaccctcacctgatgcaagaacacatgggcaccaatgtgatcgtggccaacacaatgcccacccacctgagcaacggccagatgtgcgagtggcccagacctagaggacaggccgccgcccctgaggcccctcagcctgccccacctggcggctctggcagcgagccttacaaactgctgcctggcgctgtggccaccatcgtgagacctctgagcgccatcccccagcccaccatcaccaagcaggaagtgatctgaggactagtccctgttcccagagcccacttttttttctttttttgaaataaaatagcctgtctttcagatctaaaaaaaaaaaaaaaaaaaaaaaaaaaaaaaaaaaaaaaaaaaaaaaaaaaaaaaaaaaaaaaaaaaaaaaaaaaaaaaaaaaaaaaaaaaaaaaaaaaa

SEQ ID NO: 5551 - RNA, 1562 nt, synthetic construct
  misc_feature 1..1562: note = mRNA a-1 (A100) (opt29) from Homo sapiens__NP_000448.3__HNF4A(39-474)(S87A_K106R_K108R_K126R_ K127R_S142A_S143A_S148A_T166A_S167A_S313A_S378A_T429A_T432A _S436A_K458R)
  source 1..1562: mol_type = other RNA
aggagagtcccgcagtcggcgtccagcggctctgcttgttcgtgtgtgtgtcgttgcaggccttattcaagcttaccatggacaccagccctagcgagggcaccaacctgaacgcccctaatagcctgggagtgtccgccctgtgtgccatctgtggcgatagagccaccggcaagcactacggcgccagctcttgtgatggctgcaagggcttcttccggcgggccgtgcggaagaaccacatgtacagctgccggttcagccggcagtgcgtggtggaccgggatagacggaaccagtgccggtactgcagactgaagaagtgcttcagagccggcatgcggagagaagccgtgcagaacgagcgggaccggatcagcaccagaagagccgcctacgaggacagcgccctgcccagcatcaacgccctgctgcaggccgaggtgctgagcagacagatcgccgccccagtgtccggcatcaacggcgacatccgggccaagaagatcgccagcattgccgacgtgtgcgagagcatgaaggaacagctgctggtgctggtggaatgggccaagtacatccccgccttttgcgagctgcccctggacgatcaggtggccctgctgagagcacacgccggcgaacatctgctgctgggagccaccaagcggagcatggtgttcaaggacgtgctgctgctgggcaacgactacatcgtgcccagacactgccctgagctggccgagatgagccgggtgtccatcagaatcctggacgaactggtgctgccgtttcaggaactgcagatcgacgacaacgagtacgcctacctgaaggccatcatctttttcgaccccgacgccaagggcctgagcgaccctggcaagatcaagcggctgagagcccaggtgcaagtgtccctggaagattacatcaacgaccggcagtacgacagccggggcagatttggcgaactgctcctgctgctgcccaccctgcagagcatcacctggcagatgatcgagcagatccagttcatcaagctgttcggcatggccaagatcgacaatctgctgcaggaaatgctgctcgggggcgccccttctgatgcccctcatgcccaccaccctctgcaccctcacctgatgcaagaacacatgggcaccaatgtgatcgtggccaacacaatgcccacccacctgagcaacggccagatgtgcgagtggcccagacctagaggacaggccgccgcccctgaggcccctcagcctgccccacctggcggctctggcagcgagccttacaaactgctgcctggcgctgtggccaccatcgtgagacctctgagcgccatcccccagcccaccatcaccaagcaggaagtgatctgaggactagtccctgttcccagagcccacttttttttctttttttgaaataaaatagcctgtctttcagatctaaaaaaaaaaaaaaaaaaaaaaaaaaaaaaaaaaaaaaaaaaaaaaaaaaaaaaaaaaaaaaaaaaaaaaaaaaaaaaaaaaaaaaaaaaaaaaaaaaaa

SEQ ID NO: 5552 - RNA, 1562 nt, synthetic construct
  misc_feature 1..1562: note = mRNA a-1 (A100) (opt29) from Homo sapiens__NP_000448.3__HNF4A(39-474)(S87A_K106R_K108R_K126R_ K127R)
  source 1..1562: mol_type = other RNA
aggagagtcccgcagtcggcgtccagcggctctgcttgttcgtgtgtgtgtcgttgcaggccttattcaagcttaccatggacaccagccctagcgagggcaccaacctgaacgcccctaatagcctgggagtgtccgccctgtgtgccatctgtggcgatagagccaccggcaagcactacggcgccagctcttgtgatggctgcaagggcttcttccggcgggccgtgcggaagaaccacatgtacagctgccggttcagccggcagtgcgtggtggaccgggatagacggaaccagtgccggtactgcagactgaagaagtgcttcagagccggcatgcggagagaagccgtgcagaacgagcgggaccggatcagcaccagaagaagcagctacgaggacagcagcctgcccagcatcaacgccctgctgcaggccgaggtgctgagcagacagatcaccagcccagtgtccggcatcaacggcgacatccgggccaagaagatcgccagcattgccgacgtgtgcgagagcatgaaggaacagctgctggtgctggtggaatgggccaagtacatccccgccttttgcgagctgcccctggacgatcaggtggccctgctgagagcacacgccggcgaacatctgctgctgggagccaccaagcggagcatggtgttcaaggacgtgctgctgctgggcaacgactacatcgtgcccagacactgccctgagctggccgagatgagccgggtgtccatcagaatcctggacgaactggtgctgccgtttcaggaactgcagatcgacgacaacgagtacgcctacctgaaggccatcatctttttcgaccccgacgccaagggcctgagcgaccctggcaagatcaagcggctgagaagccaggtgcaagtgtccctggaagattacatcaacgaccggcagtacgacagccggggcagatttggcgaactgctcctgctgctgcccaccctgcagagcatcacctggcagatgatcgagcagatccagttcatcaagctgttcggcatggccaagatcgacaatctgctgcaggaaatgctgctcgggggcagcccttctgatgcccctcatgcccaccaccctctgcaccctcacctgatgcaagaacacatgggcaccaatgtgatcgtggccaacacaatgcccacccacctgagcaacggccagatgtgcgagtggcccagacctagaggacaggccgccacacctgagacacctcagccttctccacctggcggctctggcagcgagccttacaaactgctgcctggcgctgtggccaccatcgtgaaacctctgagcgccatcccccagcccaccatcaccaagcaggaagtgatctgaggactagtccctgttcccagagcccacttttttttctttttttgaaataaaatagcctgtctttcagatctaaaaaaaaaaaaaaaaaaaaaaaaaaaaaaaaaaaaaaaaaaaaaaaaaaaaaaaaaaaaaaaaaaaaaaaaaaaaaaaaaaaaaaaaaaaaaaaaaaaa

SEQ ID NO: 5553 - RNA, 1562 nt, synthetic construct
  misc_feature 1..1562: note = mRNA a-1 (A100) (opt29) from Homo sapiens__NP_000448.3__HNF4A(39-474)(S87A_K106R_K108R_K126R_ K127R_S142A_S143A_S148A_T166A_S167A_S313A_S378A_T429A_T432A _S436A_K458R_S461A)
  source 1..1562: mol_type = other RNA
aggagagtcccgcagtcggcgtccagcggctctgcttgttcgtgtgtgtgtcgttgcaggccttattcaagcttaccatggacaccagccctagcgagggcaccaacctgaacgcccctaatagcctgggagtgtccgccctgtgtgccatctgtggcgatagagccaccggcaagcactacggcgccagctcttgtgatggctgcaagggcttcttccggcgggccgtgcggaagaaccacatgtacagctgccggttcagccggcagtgcgtggtggaccgggatagacggaaccagtgccggtactgcagactgaagaagtgcttcagagccggcatgcggagagaagccgtgcagaacgagcgggaccggatcagcaccagaagagccgcctacgaggacagcgccctgcccagcatcaacgccctgctgcaggccgaggtgctgagcagacagatcgccgccccagtgtccggcatcaacggcgacatccgggccaagaagatcgccagcattgccgacgtgtgcgagagcatgaaggaacagctgctggtgctggtggaatgggccaagtacatccccgccttttgcgagctgcccctggacgatcaggtggccctgctgagagcacacgccggcgaacatctgctgctgggagccaccaagcggagcatggtgttcaaggacgtgctgctgctgggcaacgactacatcgtgcccagacactgccctgagctggccgagatgagccgggtgtccatcagaatcctggacgaactggtgctgccgtttcaggaactgcagatcgacgacaacgagtacgcctacctgaaggccatcatctttttcgaccccgacgccaagggcctgagcgaccctggcaagatcaagcggctgagagcccaggtgcaagtgtccctggaagattacatcaacgaccggcagtacgacagccggggcagatttggcgaactgctcctgctgctgcccaccctgcagagcatcacctggcagatgatcgagcagatccagttcatcaagctgttcggcatggccaagatcgacaatctgctgcaggaaatgctgctcgggggcgccccttctgatgcccctcatgcccaccaccctctgcaccctcacctgatgcaagaacacatgggcaccaatgtgatcgtggccaacacaatgcccacccacctgagcaacggccagatgtgcgagtggcccagacctagaggacaggccgccgcccctgaggcccctcagcctgccccacctggcggctctggcagcgagccttacaaactgctgcctggcgctgtggccaccatcgtgagacctctggccgccatcccccagcccaccatcaccaagcaggaagtgatctgaggactagtccctgttcccagagcccacttttttttctttttttgaaataaaatagcctgtctttcagatctaaaaaaaaaaaaaaaaaaaaaaaaaaaaaaaaaaaaaaaaaaaaaaaaaaaaaaaaaaaaaaaaaaaaaaaaaaaaaaaaaaaaaaaaaaaaaaaaaaaa

SEQ ID NO: 5554 - RNA, 1562 nt, synthetic construct
  misc_feature 1..1562: note = mRNA a-1 (A100) (opt29) from Homo sapiens__NP_000448.3__HNF4A(39-474)(S87A_K106R_K108R_K126R_ K127R_S142A_S143A_S148A_T166A_S167A_S313A_S378A_T429A_T432A _S436A_K458R_S461E)
  source 1..1562: mol_type = other RNA
aggagagtcccgcagtcggcgtccagcggctctgcttgttcgtgtgtgtgtcgttgcaggccttattcaagcttaccatggacaccagccctagcgagggcaccaacctgaacgcccctaatagcctgggagtgtccgccctgtgtgccatctgtggcgatagagccaccggcaagcactacggcgccagctcttgtgatggctgcaagggcttcttccggcgggccgtgcggaagaaccacatgtacagctgccggttcagccggcagtgcgtggtggaccgggatagacggaaccagtgccggtactgcagactgaagaagtgcttcagagccggcatgcggagagaagccgtgcagaacgagcgggaccggatcagcaccagaagagccgcctacgaggacagcgccctgcccagcatcaacgccctgctgcaggccgaggtgctgagcagacagatcgccgccccagtgtccggcatcaacggcgacatccgggccaagaagatcgccagcattgccgacgtgtgcgagagcatgaaggaacagctgctggtgctggtggaatgggccaagtacatccccgccttttgcgagctgcccctggacgatcaggtggccctgctgagagcacacgccggcgaacatctgctgctgggagccaccaagcggagcatggtgttcaaggacgtgctgctgctgggcaacgactacatcgtgcccagacactgccctgagctggccgagatgagccgggtgtccatcagaatcctggacgaactggtgctgccgtttcaggaactgcagatcgacgacaacgagtacgcctacctgaaggccatcatctttttcgaccccgacgccaagggcctgagcgaccctggcaagatcaagcggctgagagcccaggtgcaagtgtccctggaagattacatcaacgaccggcagtacgacagccggggcagatttggcgaactgctcctgctgctgcccaccctgcagagcatcacctggcagatgatcgagcagatccagttcatcaagctgttcggcatggccaagatcgacaatctgctgcaggaaatgctgctcgggggcgccccttctgatgcccctcatgcccaccaccctctgcaccctcacctgatgcaagaacacatgggcaccaatgtgatcgtggccaacacaatgcccacccacctgagcaacggccagatgtgcgagtggcccagacctagaggacaggccgccgcccctgaggcccctcagcctgccccacctggcggctctggcagcgagccttacaaactgctgcctggcgctgtggccaccatcgtgagacctctggaggccatcccccagcccaccatcaccaagcaggaagtgatctgaggactagtccctgttcccagagcccacttttttttctttttttgaaataaaatagcctgtctttcagatctaaaaaaaaaaaaaaaaaaaaaaaaaaaaaaaaaaaaaaaaaaaaaaaaaaaaaaaaaaaaaaaaaaaaaaaaaaaaaaaaaaaaaaaaaaaaaaaaaaaa

SEQ ID NO: 5555 - RNA, 1562 nt, synthetic construct
  misc_feature 1..1562: note = mRNA a-1 (A100) (opt29) from Homo sapiens__NP_000448.3__HNF4A(39-474)(S87A_K106R_K108R_K126R_ K127R_S142A_S143A_S148E_T166A_S167E_S313A_S378E_T429E_T432E _S436E_K458R_S461E)
  source 1..1562: mol_type = other RNA
aggagagtcccgcagtcggcgtccagcggctctgcttgttcgtgtgtgtgtcgttgcaggccttattcaagcttaccatggacaccagccctagcgagggcaccaacctgaacgcccctaatagcctgggagtgtccgccctgtgtgccatctgtggcgatagagccaccggcaagcactacggcgccagctcttgtgatggctgcaagggcttcttccggcgggccgtgcggaagaaccacatgtacagctgccggttcagccggcagtgcgtggtggaccgggatagacggaaccagtgccggtactgcagactgaagaagtgcttcagagccggcatgcggagagaagccgtgcagaacgagcgggaccggatcagcaccagaagagccgcctacgaggacagcgaactgcccagcatcaacgccctgctgcaggccgaggtgctgagcagacagatcgccgaaccagtgtccggcatcaacggcgacatccgggccaagaagatcgccagcattgccgacgtgtgcgagagcatgaaggaacagctgctggtgctggtggaatgggccaagtacatccccgccttttgcgagctgcccctggacgatcaggtggccctgctgagagcacacgccggcgaacatctgctgctgggagccaccaagcggagcatggtgttcaaggacgtgctgctgctgggcaacgactacatcgtgcccagacactgccctgagctggccgagatgagccgggtgtccatcagaatcctggacgaactggtgctgccgtttcaggaactgcagatcgacgacaacgagtacgcctacctgaaggccatcatctttttcgaccccgacgccaagggcctgagcgaccctggcaagatcaagcggctgagagcccaggtgcaagtgtccctggaagattacatcaacgaccggcagtacgacagccggggcagatttggcgaactgctcctgctgctgcccaccctgcagagcatcacctggcagatgatcgagcagatccagttcatcaagctgttcggcatggccaagatcgacaatctgctgcaggaaatgctgctcgggggcgagccttctgatgcccctcatgcccaccaccctctgcaccctcacctgatgcaagaacacatgggcaccaatgtgatcgtggccaacacaatgcccacccacctgagcaacggccagatgtgcgagtggcccagacctagaggacaggccgccgaacctgaggagcctcagcctgaaccacctggcggctctggcagcgagccttacaaactgctgcctggcgctgtggccaccatcgtgagacctctggaggccatcccccagcccaccatcaccaagcaggaagtgatctgaggactagtccctgttcccagagcccacttttttttctttttttgaaataaaatagcctgtctttcagatctaaaaaaaaaaaaaaaaaaaaaaaaaaaaaaaaaaaaaaaaaaaaaaaaaaaaaaaaaaaaaaaaaaaaaaaaaaaaaaaaaaaaaaaaaaaaaaaaaaaa

SEQ ID NO: 5556 - RNA, 1562 nt, synthetic construct
  misc_feature 1..1562: note = mRNA a-1 (A100) (opt29) from Homo sapiens__NP_000448.3__HNF4A(39-474)(S87A_K106R_K108R_K126R_ K127R_S142A_S143A_S148A_T166A_S167A_K179R_K180R_S313A_S378A _T429A_T432A_S436A_K458R_S461E)
  source 1..1562: mol_type = other RNA
aggagagtcccgcagtcggcgtccagcggctctgcttgttcgtgtgtgtgtcgttgcaggccttattcaagcttaccatggacaccagccctagcgagggcaccaacctgaacgcccctaatagcctgggagtgtccgccctgtgtgccatctgtggcgatagagccaccggcaagcactacggcgccagctcttgtgatggctgcaagggcttcttccggcgggccgtgcggaagaaccacatgtacagctgccggttcagccggcagtgcgtggtggaccgggatagacggaaccagtgccggtactgcagactgaagaagtgcttcagagccggcatgcggagagaagccgtgcagaacgagcgggaccggatcagcaccagaagagccgcctacgaggacagcgccctgcccagcatcaacgccctgctgcaggccgaggtgctgagcagacagatcgccgccccagtgtccggcatcaacggcgacatccgggcccggagaatcgccagcattgccgacgtgtgcgagagcatgaaggaacagctgctggtgctggtggaatgggccaagtacatccccgccttttgcgagctgcccctggacgatcaggtggccctgctgagagcacacgccggcgaacatctgctgctgggagccaccaagcggagcatggtgttcaaggacgtgctgctgctgggcaacgactacatcgtgcccagacactgccctgagctggccgagatgagccgggtgtccatcagaatcctggacgaactggtgctgccgtttcaggaactgcagatcgacgacaacgagtacgcctacctgaaggccatcatctttttcgaccccgacgccaagggcctgagcgaccctggcaagatcaagcggctgagagcccaggtgcaagtgtccctggaagattacatcaacgaccggcagtacgacagccggggcagatttggcgaactgctcctgctgctgcccaccctgcagagcatcacctggcagatgatcgagcagatccagttcatcaagctgttcggcatggccaagatcgacaatctgctgcaggaaatgctgctcgggggcgccccttctgatgcccctcatgcccaccaccctctgcaccctcacctgatgcaagaacacatgggcaccaatgtgatcgtggccaacacaatgcccacccacctgagcaacggccagatgtgcgagtggcccagacctagaggacaggccgccgcccctgaggcccctcagcctgccccacctggcggctctggcagcgagccttacaaactgctgcctggcgctgtggccaccatcgtgagacctctggaggccatcccccagcccaccatcaccaagcaggaagtgatctgaggactagtccctgttcccagagcccacttttttttctttttttgaaataaaatagcctgtctttcagatctaaaaaaaaaaaaaaaaaaaaaaaaaaaaaaaaaaaaaaaaaaaaaaaaaaaaaaaaaaaaaaaaaaaaaaaaaaaaaaaaaaaaaaaaaaaaaaaaaaaa

SEQ ID NO: 5557 - RNA, 1562 nt, synthetic construct
  misc_feature 1..1562: note = mRNA a-1 (A100) (opt29) from Homo sapiens__NP_000448.3__HNF4A(39-474)(S87A_K106R_K108R_K126R_ K127R_S142A_S143A_S148A_T166A_S167A_K300R_K307R_K309R_S313A _S378A_T429A_T432A_S436A_K458R_S461E)
  source 1..1562: mol_type = other RNA
aggagagtcccgcagtcggcgtccagcggctctgcttgttcgtgtgtgtgtcgttgcaggccttattcaagcttaccatggacaccagccctagcgagggcaccaacctgaacgcccctaatagcctgggagtgtccgccctgtgtgccatctgtggcgatagagccaccggcaagcactacggcgccagctcttgtgatggctgcaagggcttcttccggcgggccgtgcggaagaaccacatgtacagctgccggttcagccggcagtgcgtggtggaccgggatagacggaaccagtgccggtactgcagactgaagaagtgcttcagagccggcatgcggagagaagccgtgcagaacgagcgggaccggatcagcaccagaagagccgcctacgaggacagcgccctgcccagcatcaacgccctgctgcaggccgaggtgctgagcagacagatcgccgccccagtgtccggcatcaacggcgacatccgggccaagaagatcgccagcattgccgacgtgtgcgagagcatgaaggaacagctgctggtgctggtggaatgggccaagtacatccccgccttttgcgagctgcccctggacgatcaggtggccctgctgagagcacacgccggcgaacatctgctgctgggagccaccaagcggagcatggtgttcaaggacgtgctgctgctgggcaacgactacatcgtgcccagacactgccctgagctggccgagatgagccgggtgtccatcagaatcctggacgaactggtgctgccgtttcaggaactgcagatcgacgacaacgagtacgcctacctgaaggccatcatctttttcgaccccgacgccagaggcctgagcgaccctggccggatcagacggctgagagcccaggtgcaagtgtccctggaagattacatcaacgaccggcagtacgacagccggggcagatttggcgaactgctcctgctgctgcccaccctgcagagcatcacctggcagatgatcgagcagatccagttcatcaagctgttcggcatggccaagatcgacaatctgctgcaggaaatgctgctcgggggcgccccttctgatgcccctcatgcccaccaccctctgcaccctcacctgatgcaagaacacatgggcaccaatgtgatcgtggccaacacaatgcccacccacctgagcaacggccagatgtgcgagtggcccagacctagaggacaggccgccgcccctgaggcccctcagcctgccccacctggcggctctggcagcgagccttacaaactgctgcctggcgctgtggccaccatcgtgagacctctggaggccatcccccagcccaccatcaccaagcaggaagtgatctgaggactagtccctgttcccagagcccacttttttttctttttttgaaataaaatagcctgtctttcagatctaaaaaaaaaaaaaaaaaaaaaaaaaaaaaaaaaaaaaaaaaaaaaaaaaaaaaaaaaaaaaaaaaaaaaaaaaaaaaaaaaaaaaaaaaaaaaaaaaaaa

SEQ ID NO: 5558 - RNA, 1562 nt, synthetic construct
  misc_feature 1..1562: note = mRNA a-1 (A100) (opt29) from Homo sapiens__NP_000448.3__HNF4A(39-474)(S87A_K106R_K108R_K126R_ K127R_S142A_S143A_S148A_T166A_S167A_S313A_S378A_T429A_T432A _S436A_K447R_K458R_S461E_K470R)
  source 1..1562: mol_type = other RNA
aggagagtcccgcagtcggcgtccagcggctctgcttgttcgtgtgtgtgtcgttgcaggccttattcaagcttaccatggacaccagccctagcgagggcaccaacctgaacgcccctaatagcctgggagtgtccgccctgtgtgccatctgtggcgatagagccaccggcaagcactacggcgccagctcttgtgatggctgcaagggcttcttccggcgggccgtgcggaagaaccacatgtacagctgccggttcagccggcagtgcgtggtggaccgggatagacggaaccagtgccggtactgcagactgaagaagtgcttcagagccggcatgcggagagaagccgtgcagaacgagcgggaccggatcagcaccagaagagccgcctacgaggacagcgccctgcccagcatcaacgccctgctgcaggccgaggtgctgagcagacagatcgccgccccagtgtccggcatcaacggcgacatccgggccaagaagatcgccagcattgccgacgtgtgcgagagcatgaaggaacagctgctggtgctggtggaatgggccaagtacatccccgccttttgcgagctgcccctggacgatcaggtggccctgctgagagcacacgccggcgaacatctgctgctgggagccaccaagcggagcatggtgttcaaggacgtgctgctgctgggcaacgactacatcgtgcccagacactgccctgagctggccgagatgagccgggtgtccatcagaatcctggacgaactggtgctgccgtttcaggaactgcagatcgacgacaacgagtacgcctacctgaaggccatcatctttttcgaccccgacgccaagggcctgagcgaccctggcaagatcaagcggctgagagcccaggtgcaagtgtccctggaagattacatcaacgaccggcagtacgacagccggggcagatttggcgaactgctcctgctgctgcccaccctgcagagcatcacctggcagatgatcgagcagatccagttcatcaagctgttcggcatggccaagatcgacaatctgctgcaggaaatgctgctcgggggcgccccttctgatgcccctcatgcccaccaccctctgcaccctcacctgatgcaagaacacatgggcaccaatgtgatcgtggccaacacaatgcccacccacctgagcaacggccagatgtgcgagtggcccagacctagaggacaggccgccgcccctgaggcccctcagcctgccccacctggcggctctggcagcgagccttaccggctgctgcctggcgctgtggccaccatcgtgagacctctggaggccatcccccagcccaccatcacccggcaggaagtgatctgaggactagtccctgttcccagagcccacttttttttctttttttgaaataaaatagcctgtctttcagatctaaaaaaaaaaaaaaaaaaaaaaaaaaaaaaaaaaaaaaaaaaaaaaaaaaaaaaaaaaaaaaaaaaaaaaaaaaaaaaaaaaaaaaaaaaaaaaaaaaaa

SEQ ID NO: 5559 - RNA, 1562 nt, synthetic construct
  misc_feature 1..1562: note = mRNA a-1 (A100) (opt29) from Homo sapiens__NP_000448.3__HNF4A(39-474)(S87A_K106R_K108R_K126R_ K127R_S142A_S143A_S148A_T166A_S167A_K179R_K180R_K234R_K300R _K307R_K309R_S313A_S378A_T429A_T432A_S436A_K447R_K458R_S461 E_K470R)
  source 1..1562: mol_type = other RNA
aggagagtcccgcagtcggcgtccagcggctctgcttgttcgtgtgtgtgtcgttgcaggccttattcaagcttaccatggacaccagccctagcgagggcaccaacctgaacgcccctaatagcctgggagtgtccgccctgtgtgccatctgtggcgatagagccaccggcaagcactacggcgccagctcttgtgatggctgcaagggcttcttccggcgggccgtgcggaagaaccacatgtacagctgccggttcagccggcagtgcgtggtggaccgggatagacggaaccagtgccggtactgcagactgaagaagtgcttcagagccggcatgcggagagaagccgtgcagaacgagcgggaccggatcagcaccagaagagccgcctacgaggacagcgccctgcccagcatcaacgccctgctgcaggccgaggtgctgagcagacagatcgccgccccagtgtccggcatcaacggcgacatccgggcccggagaatcgccagcattgccgacgtgtgcgagagcatgaaggaacagctgctggtgctggtggaatgggccaagtacatccccgccttttgcgagctgcccctggacgatcaggtggccctgctgagagcacacgccggcgaacatctgctgctgggagccacccggcggagcatggtgttcaaggacgtgctgctgctgggcaacgactacatcgtgcccagacactgccctgagctggccgagatgagccgggtgtccatcagaatcctggacgaactggtgctgccgtttcaggaactgcagatcgacgacaacgagtacgcctacctgaaggccatcatctttttcgaccccgacgccagaggcctgagcgaccctggccggatcagacggctgagagcccaggtgcaagtgtccctggaagattacatcaacgaccggcagtacgacagccggggcagatttggcgaactgctcctgctgctgcccaccctgcagagcatcacctggcagatgatcgagcagatccagttcatcaagctgttcggcatggccaagatcgacaatctgctgcaggaaatgctgctcgggggcgccccttctgatgcccctcatgcccaccaccctctgcaccctcacctgatgcaagaacacatgggcaccaatgtgatcgtggccaacacaatgcccacccacctgagcaacggccagatgtgcgagtggcccagacctagaggacaggccgccgcccctgaggcccctcagcctgccccacctggcggctctggcagcgagccttaccggctgctgcctggcgctgtggccaccatcgtgagacctctggaggccatcccccagcccaccatcacccggcaggaagtgatctgaggactagtccctgttcccagagcccacttttttttctttttttgaaataaaatagcctgtctttcagatctaaaaaaaaaaaaaaaaaaaaaaaaaaaaaaaaaaaaaaaaaaaaaaaaaaaaaaaaaaaaaaaaaaaaaaaaaaaaaaaaaaaaaaaaaaaaaaaaaaaa

SEQ ID NO: 5560 - RNA, 1562 nt, synthetic construct
  misc_feature 1..1562: note = mRNA a-1 (A100) (opt29) from Homo sapiens__NP_000448.3__HNF4A(39-474)(S87A_S95A_S99A_K106R_K1 08R_K126R_K127R_S142A_S143A_S148A_T166A_S167A_S313A_S378A_T 429A_T432A_S436A_K458R_S461E)
  source 1..1562: mol_type = other RNA
aggagagtcccgcagtcggcgtccagcggctctgcttgttcgtgtgtgtgtcgttgcaggccttattcaagcttaccatggacaccagccctagcgagggcaccaacctgaacgcccctaatagcctgggagtgtccgccctgtgtgccatctgtggcgatagagccaccggcaagcactacggcgccagctcttgtgatggctgcaagggcttcttccggcgggccgtgcggaagaaccacatgtacgcctgccggttcgcccggcagtgcgtggtggaccgggatagacggaaccagtgccggtactgcagactgaagaagtgcttcagagccggcatgcggagagaagccgtgcagaacgagcgggaccggatcagcaccagaagagccgcctacgaggacagcgccctgcccagcatcaacgccctgctgcaggccgaggtgctgagcagacagatcgccgccccagtgtccggcatcaacggcgacatccgggccaagaagatcgccagcattgccgacgtgtgcgagagcatgaaggaacagctgctggtgctggtggaatgggccaagtacatccccgccttttgcgagctgcccctggacgatcaggtggccctgctgagagcacacgccggcgaacatctgctgctgggagccaccaagcggagcatggtgttcaaggacgtgctgctgctgggcaacgactacatcgtgcccagacactgccctgagctggccgagatgagccgggtgtccatcagaatcctggacgaactggtgctgccgtttcaggaactgcagatcgacgacaacgagtacgcctacctgaaggccatcatctttttcgaccccgacgccaagggcctgagcgaccctggcaagatcaagcggctgagagcccaggtgcaagtgtccctggaagattacatcaacgaccggcagtacgacagccggggcagatttggcgaactgctcctgctgctgcccaccctgcagagcatcacctggcagatgatcgagcagatccagttcatcaagctgttcggcatggccaagatcgacaatctgctgcaggaaatgctgctcgggggcgccccttctgatgcccctcatgcccaccaccctctgcaccctcacctgatgcaagaacacatgggcaccaatgtgatcgtggccaacacaatgcccacccacctgagcaacggccagatgtgcgagtggcccagacctagaggacaggccgccgcccctgaggcccctcagcctgccccacctggcggctctggcagcgagccttacaaactgctgcctggcgctgtggccaccatcgtgagacctctggaggccatcccccagcccaccatcaccaagcaggaagtgatctgaggactagtccctgttcccagagcccacttttttttctttttttgaaataaaatagcctgtctttcagatctaaaaaaaaaaaaaaaaaaaaaaaaaaaaaaaaaaaaaaaaaaaaaaaaaaaaaaaaaaaaaaaaaaaaaaaaaaaaaaaaaaaaaaaaaaaaaaaaaaaa

SEQ ID NO: 5561 - RNA, 1562 nt, synthetic construct
  misc_feature 1..1562: note = mRNA a-1 (A100) (opt29) from Homo sapiens__NP_000448.3__HNF4A(39-474)(S87A_K106R_K108R_K126R_ K127R_S138A_T139A_S142A_S143A_S148A_T166A_S167A_S313A_S378A _T429A_T432A_S436A_K458R_S461E)
  source 1..1562: mol_type = other RNA
aggagagtcccgcagtcggcgtccagcggctctgcttgttcgtgtgtgtgtcgttgcaggccttattcaagcttaccatggacaccagccctagcgagggcaccaacctgaacgcccctaatagcctgggagtgtccgccctgtgtgccatctgtggcgatagagccaccggcaagcactacggcgccagctcttgtgatggctgcaagggcttcttccggcgggccgtgcggaagaaccacatgtacagctgccggttcagccggcagtgcgtggtggaccgggatagacggaaccagtgccggtactgcagactgaagaagtgcttcagagccggcatgcggagagaagccgtgcagaacgagcgggaccggatcgccgccagaagagccgcctacgaggacagcgccctgcccagcatcaacgccctgctgcaggccgaggtgctgagcagacagatcgccgccccagtgtccggcatcaacggcgacatccgggccaagaagatcgccagcattgccgacgtgtgcgagagcatgaaggaacagctgctggtgctggtggaatgggccaagtacatccccgccttttgcgagctgcccctggacgatcaggtggccctgctgagagcacacgccggcgaacatctgctgctgggagccaccaagcggagcatggtgttcaaggacgtgctgctgctgggcaacgactacatcgtgcccagacactgccctgagctggccgagatgagccgggtgtccatcagaatcctggacgaactggtgctgccgtttcaggaactgcagatcgacgacaacgagtacgcctacctgaaggccatcatctttttcgaccccgacgccaagggcctgagcgaccctggcaagatcaagcggctgagagcccaggtgcaagtgtccctggaagattacatcaacgaccggcagtacgacagccggggcagatttggcgaactgctcctgctgctgcccaccctgcagagcatcacctggcagatgatcgagcagatccagttcatcaagctgttcggcatggccaagatcgacaatctgctgcaggaaatgctgctcgggggcgccccttctgatgcccctcatgcccaccaccctctgcaccctcacctgatgcaagaacacatgggcaccaatgtgatcgtggccaacacaatgcccacccacctgagcaacggccagatgtgcgagtggcccagacctagaggacaggccgccgcccctgaggcccctcagcctgccccacctggcggctctggcagcgagccttacaaactgctgcctggcgctgtggccaccatcgtgagacctctggaggccatcccccagcccaccatcaccaagcaggaagtgatctgaggactagtccctgttcccagagcccacttttttttctttttttgaaataaaatagcctgtctttcagatctaaaaaaaaaaaaaaaaaaaaaaaaaaaaaaaaaaaaaaaaaaaaaaaaaaaaaaaaaaaaaaaaaaaaaaaaaaaaaaaaaaaaaaaaaaaaaaaaaaaa

SEQ ID NO: 5562 - RNA, 1562 nt, synthetic construct
  misc_feature 1..1562: note = mRNA a-1 (A100) (opt29) from Homo sapiens__NP_000448.3__HNF4A(39-474)(S87A_S95A_S99A_K106R_K1 08R_K126R_K127R_S138A_T139A_S142A_S143A_S148A_T166A_S167A_S 313A_S378A_T429A_T432A_S436A_K458R_S461E)
  source 1..1562: mol_type = other RNA
aggagagtcccgcagtcggcgtccagcggctctgcttgttcgtgtgtgtgtcgttgcaggccttattcaagcttaccatggacaccagccctagcgagggcaccaacctgaacgcccctaatagcctgggagtgtccgccctgtgtgccatctgtggcgatagagccaccggcaagcactacggcgccagctcttgtgatggctgcaagggcttcttccggcgggccgtgcggaagaaccacatgtacgcctgccggttcgcccggcagtgcgtggtggaccgggatagacggaaccagtgccggtactgcagactgaagaagtgcttcagagccggcatgcggagagaagccgtgcagaacgagcgggaccggatcgccgccagaagagccgcctacgaggacagcgccctgcccagcatcaacgccctgctgcaggccgaggtgctgagcagacagatcgccgccccagtgtccggcatcaacggcgacatccgggccaagaagatcgccagcattgccgacgtgtgcgagagcatgaaggaacagctgctggtgctggtggaatgggccaagtacatccccgccttttgcgagctgcccctggacgatcaggtggccctgctgagagcacacgccggcgaacatctgctgctgggagccaccaagcggagcatggtgttcaaggacgtgctgctgctgggcaacgactacatcgtgcccagacactgccctgagctggccgagatgagccgggtgtccatcagaatcctggacgaactggtgctgccgtttcaggaactgcagatcgacgacaacgagtacgcctacctgaaggccatcatctttttcgaccccgacgccaagggcctgagcgaccctggcaagatcaagcggctgagagcccaggtgcaagtgtccctggaagattacatcaacgaccggcagtacgacagccggggcagatttggcgaactgctcctgctgctgcccaccctgcagagcatcacctggcagatgatcgagcagatccagttcatcaagctgttcggcatggccaagatcgacaatctgctgcaggaaatgctgctcgggggcgccccttctgatgcccctcatgcccaccaccctctgcaccctcacctgatgcaagaacacatgggcaccaatgtgatcgtggccaacacaatgcccacccacctgagcaacggccagatgtgcgagtggcccagacctagaggacaggccgccgcccctgaggcccctcagcctgccccacctggcggctctggcagcgagccttacaaactgctgcctggcgctgtggccaccatcgtgagacctctggaggccatcccccagcccaccatcaccaagcaggaagtgatctgaggactagtccctgttcccagagcccacttttttttctttttttgaaataaaatagcctgtctttcagatctaaaaaaaaaaaaaaaaaaaaaaaaaaaaaaaaaaaaaaaaaaaaaaaaaaaaaaaaaaaaaaaaaaaaaaaaaaaaaaaaaaaaaaaaaaaaaaaaaaaa

SEQ ID NO: 5563 - RNA, 1790 nt, synthetic construct
  misc_feature 1..1790: note = mRNA a-1 (hSL-A100) (wt) from Homo sapiens__NP_000448.3__HNF4A(1-474)_HA-tag R9455
  source 1..1790: mol_type = other RNA
aggagagtcccgcagtcggcgtccagcggctctgcttgttcgtgtgtgtgtcgttgcaggccttattcaagcttaccatgcgactctccaaaaccctcgtcgacatggacatggccgactacagtgctgcactggacccagcctacaccaccctggaatttgagaatgtccaggtgttgacgatgggcaatgacacgtccccatcagaaggcaccaacctcaacgcgcccaacagcctgggtgtgagcgccctgtgtgccatctgcggggaccgggccacgggcaaacactacggtgcctcgagctgtgacggctgcaagggcttcttccggaggagcgtgcggaagaaccacatgtactcctgcagatttagccggcagtgcgtggtggacaaagacaagaggaaccagtgccgctactgcaggctcaagaaatgcttccgggctggcatgaagaaggaagccgtccagaatgagcgggaccggatcagcactcgaaggtcaagctatgaggacagcagcctgccctccatcaatgcgctcctgcaggcggaggtcctgtcccgacagatcacctcccccgtctccgggatcaacggcgacattcgggcgaagaagattgccagcatcgcagatgtgtgtgagtccatgaaggagcagctgctggttctcgttgagtgggccaagtacatcccagctttctgcgagctccccctggacgaccaggtggccctgctcagagcccatgctggcgagcacctcctgctcggagccaccaagagatccatggtgttcaaggacgtgctgctcctaggcaatgactacattgtccctcggcactgcccggagctggcggagatgagccgggtgtccatacgcatccttgacgagctggtgctgcccttccaggagctgcagatcgatgacaatgagtatgcctacctcaaagccatcatcttctttgacccagatgccaaggggctgagcgatccagggaagatcaagcggctgcgttcccaggtccaggtgagcttggaggactacatcaacgaccgccagtatgactcgcgtggccgctttggagagctgctgctgctgctgcccaccttgcagagcatcacctggcagatgatcgagcagatccagttcatcaagctgttcggcatggccaagattgacaacctgttgcaggagatgctgctgggagggtcccccagcgatgcaccccatgcccaccaccccctgcaccctcacctgatgcaggaacatatgggaaccaacgtgatcgttgccaacacaatgcccactcacctcagcaacggacagatgtgtgagtggccccgacccaggggacaggcagccacccctgagaccccacagccctcaccgccaggtggctcagggtctgagccctataagctcctgccgggagccgtcgccacaatcgtcaagcccctctctgccatcccccagccgaccatcaccaagcaggaagttatcgcctatccttatgatgttcctgattatgcagcctacccctacgacgtgccggactacgccgcctacccctatgacgtgcctgattacgccgcgtgaggactagtccctgttcccagagcccacttttttttctttttttgaaataaaatagcctgtctttcagatctcaaaggctcttttcagagccaccaaaaaaaaaaaaaaaaaaaaaaaaaaaaaaaaaaaaaaaaaaaaaaaaaaaaaaaaaaaaaaaaaaaaaaaaaaaaaaaaaaaaaaaaaaaaaaaaaaaaa

SEQ ID NO: 5564 - RNA, 1790 nt, synthetic construct
  misc_feature 1..1790: note = mRNA a-1 (hSL-A100) (opt1) from Homo sapiens__NP_000448.3__HNF4A(1-474)_HA-tag R9456
  source 1..1790: mol_type = other RNA
aggagagtcccgcagtcggcgtccagcggctctgcttgttcgtgtgtgtgtcgttgcaggccttattcaagcttaccatgcgcctgagcaagaccctcgtggacatggacatggccgactactccgccgcgctggaccccgcctacaccacgctggagttcgagaacgtccaggtgctcaccatgggcaacgacaccagcccgtccgaggggaccaacctgaacgcccccaacagcctgggcgtgtccgccctctgcgccatctgcggggaccgggcgacgggcaagcactacggggccagctcctgcgacggctgcaagggcttcttccgccggagcgtccgcaagaaccacatgtactcctgccggttcagccgccagtgcgtggtggacaaggacaagcggaaccagtgccgctactgccggctgaagaagtgcttccgcgccgggatgaagaaggaggccgtccagaacgagcgggaccgcatctccacccggcgcagctcctacgaggacagctccctgcccagcatcaacgcgctcctgcaggccgaggtgctgtcccggcagatcaccagccccgtgtccggcatcaacggggacatccgcgccaagaagatcgccagcatcgccgacgtctgcgagagcatgaaggagcagctcctggtgctggtggagtgggcgaagtacatcccggccttctgcgagctccccctggacgaccaggtcgccctgctccgggcccacgccggcgagcacctcctgctgggggcgaccaagcgctccatggtgttcaaggacgtgctgctgctcggcaacgactacatcgtcccccggcactgccccgagctggccgagatgagccgcgtgtccatccggatcctggacgagctcgtgctgccgttccaggagctgcagatcgacgacaacgagtacgcctacctcaaggccatcatcttcttcgaccccgacgccaagggcctgagcgaccccgggaagatcaagcgcctgcgctcccaggtccaggtgagcctcgaggactacatcaacgaccggcagtacgactcccgcggccggttcggggagctgctgctcctgctgcccacgctccagagcatcacctggcagatgatcgagcagatccagttcatcaagctgttcggcatggcgaagatcgacaacctgctccaggagatgctgctgggcgggtccccgagcgacgcgccccacgcccaccaccccctccacccccacctgatgcaggagcacatgggcaccaacgtgatcgtcgccaacaccatgccgacgcacctgtccaacgggcagatgtgcgagtggccccgcccccggggccaggccgccacccccgagaccccgcagcccagcccgcccgggggctccggcagcgagccctacaagctgctccccggggccgtggccaccatcgtgaagcccctgtccgccatcccccagccgacgatcaccaagcaggaggtcatcgcctatccttatgatgttcctgattatgcagcctacccctacgacgtgccggactacgccgcctacccctatgacgtgcctgattacgccgcgtgaggactagtccctgttcccagagcccacttttttttctttttttgaaataaaatagcctgtctttcagatctcaaaggctcttttcagagccaccaaaaaaaaaaaaaaaaaaaaaaaaaaaaaaaaaaaaaaaaaaaaaaaaaaaaaaaaaaaaaaaaaaaaaaaaaaaaaaaaaaaaaaaaaaaaaaaaaaaaa

SEQ ID NO: 5565 - RNA, 1790 nt, synthetic construct
  misc_feature 1..1790: note = mRNA a-1 (hSL-A100) (opt1) from Homo sapiens__NP_000448.3__HNF4A(1-474)(S313A)_HA-tag R9457
  source 1..1790: mol_type = other RNA
aggagagtcccgcagtcggcgtccagcggctctgcttgttcgtgtgtgtgtcgttgcaggccttattcaagcttaccatgcgcctgagcaagaccctcgtggacatggacatggccgactactccgccgcgctggaccccgcctacaccacgctggagttcgagaacgtccaggtgctcaccatgggcaacgacaccagcccgtccgaggggaccaacctgaacgcccccaacagcctgggcgtgtccgccctctgcgccatctgcggggaccgggcgacgggcaagcactacggggccagctcctgcgacggctgcaagggcttcttccgccggagcgtccgcaagaaccacatgtactcctgccggttcagccgccagtgcgtggtggacaaggacaagcggaaccagtgccgctactgccggctgaagaagtgcttccgcgccgggatgaagaaggaggccgtccagaacgagcgggaccgcatctccacccggcgcagctcctacgaggacagctccctgcccagcatcaacgcgctcctgcaggccgaggtgctgtcccggcagatcaccagccccgtgtccggcatcaacggggacatccgcgccaagaagatcgccagcatcgccgacgtctgcgagagcatgaaggagcagctcctggtgctggtggagtgggcgaagtacatcccggccttctgcgagctccccctggacgaccaggtcgccctgctccgggcccacgccggcgagcacctcctgctgggggcgaccaagcgctccatggtgttcaaggacgtgctgctgctcggcaacgactacatcgtcccccggcactgccccgagctggccgagatgagccgcgtgtccatccggatcctggacgagctcgtgctgccgttccaggagctgcagatcgacgacaacgagtacgcctacctcaaggccatcatcttcttcgaccccgacgccaagggcctgagcgaccccgggaagatcaagcgcctgcgcgcgcaggtccaggtgagcctcgaggactacatcaacgaccggcagtacgactcccgcggccggttcggggagctgctgctcctgctgcccacgctccagagcatcacctggcagatgatcgagcagatccagttcatcaagctgttcggcatggcgaagatcgacaacctgctccaggagatgctgctgggcgggtccccgagcgacgcgccccacgcccaccaccccctccacccccacctgatgcaggagcacatgggcaccaacgtgatcgtcgccaacaccatgccgacgcacctgtccaacgggcagatgtgcgagtggccccgcccccggggccaggccgccacccccgagaccccgcagcccagcccgcccgggggctccggcagcgagccctacaagctgctccccggggccgtggccaccatcgtgaagcccctgtccgccatcccccagccgacgatcaccaagcaggaggtcatcgcctatccttatgatgttcctgattatgcagcctacccctacgacgtgccggactacgccgcctacccctatgacgtgcctgattacgccgcgtgaggactagtccctgttcccagagcccacttttttttctttttttgaaataaaatagcctgtctttcagatctcaaaggctcttttcagagccaccaaaaaaaaaaaaaaaaaaaaaaaaaaaaaaaaaaaaaaaaaaaaaaaaaaaaaaaaaaaaaaaaaaaaaaaaaaaaaaaaaaaaaaaaaaaaaaaaaaaaa

SEQ ID NO: 5566 - RNA, 1790 nt, synthetic construct
  misc_feature 1..1790: note = mRNA a-1 (hSL-A100) (opt1) from Homo sapiens__NP_000448.3__HNF4A(1-474)(S313E)_HA-tag R9458
  source 1..1790: mol_type = other RNA
aggagagtcccgcagtcggcgtccagcggctctgcttgttcgtgtgtgtgtcgttgcaggccttattcaagcttaccatgcgcctgagcaagaccctcgtggacatggacatggccgactactccgccgcgctggaccccgcctacaccacgctggagttcgagaacgtccaggtgctcaccatgggcaacgacaccagcccgtccgaggggaccaacctgaacgcccccaacagcctgggcgtgtccgccctctgcgccatctgcggggaccgggcgacgggcaagcactacggggccagctcctgcgacggctgcaagggcttcttccgccggagcgtccgcaagaaccacatgtactcctgccggttcagccgccagtgcgtggtggacaaggacaagcggaaccagtgccgctactgccggctgaagaagtgcttccgcgccgggatgaagaaggaggccgtccagaacgagcgggaccgcatctccacccggcgcagctcctacgaggacagctccctgcccagcatcaacgcgctcctgcaggccgaggtgctgtcccggcagatcaccagccccgtgtccggcatcaacggggacatccgcgccaagaagatcgccagcatcgccgacgtctgcgagagcatgaaggagcagctcctggtgctggtggagtgggcgaagtacatcccggccttctgcgagctccccctggacgaccaggtcgccctgctccgggcccacgccggcgagcacctcctgctgggggcgaccaagcgctccatggtgttcaaggacgtgctgctgctcggcaacgactacatcgtcccccggcactgccccgagctggccgagatgagccgcgtgtccatccggatcctggacgagctcgtgctgccgttccaggagctgcagatcgacgacaacgagtacgcctacctcaaggccatcatcttcttcgaccccgacgccaagggcctgagcgaccccgggaagatcaagcgcctgcgcgagcaggtccaggtgagcctcgaggactacatcaacgaccggcagtacgactcccgcggccggttcggggagctgctgctcctgctgcccacgctccagagcatcacctggcagatgatcgagcagatccagttcatcaagctgttcggcatggcgaagatcgacaacctgctccaggagatgctgctgggcgggtccccgagcgacgcgccccacgcccaccaccccctccacccccacctgatgcaggagcacatgggcaccaacgtgatcgtcgccaacaccatgccgacgcacctgtccaacgggcagatgtgcgagtggccccgcccccggggccaggccgccacccccgagaccccgcagcccagcccgcccgggggctccggcagcgagccctacaagctgctccccggggccgtggccaccatcgtgaagcccctgtccgccatcccccagccgacgatcaccaagcaggaggtcatcgcctatccttatgatgttcctgattatgcagcctacccctacgacgtgccggactacgccgcctacccctatgacgtgcctgattacgccgcgtgaggactagtccctgttcccagagcccacttttttttctttttttgaaataaaatagcctgtctttcagatctcaaaggctcttttcagagccaccaaaaaaaaaaaaaaaaaaaaaaaaaaaaaaaaaaaaaaaaaaaaaaaaaaaaaaaaaaaaaaaaaaaaaaaaaaaaaaaaaaaaaaaaaaaaaaaaaaaaa

SEQ ID NO: 5567 - RNA, 1790 nt, synthetic construct
  misc_feature 1..1790: note = mRNA a-1 (hSL-A100) (opt1) from Homo sapiens__NP_000448.3__HNF4A(1-474)(S142A_S143A)_HA-tag R9459
  source 1..1790: mol_type = other RNA
aggagagtcccgcagtcggcgtccagcggctctgcttgttcgtgtgtgtgtcgttgcaggccttattcaagcttaccatgcgcctgagcaagaccctcgtggacatggacatggccgactactccgccgcgctggaccccgcctacaccacgctggagttcgagaacgtccaggtgctcaccatgggcaacgacaccagcccgtccgaggggaccaacctgaacgcccccaacagcctgggcgtgtccgccctctgcgccatctgcggggaccgggcgacgggcaagcactacggggccagctcctgcgacggctgcaagggcttcttccgccggagcgtccgcaagaaccacatgtactcctgccggttcagccgccagtgcgtggtggacaaggacaagcggaaccagtgccgctactgccggctgaagaagtgcttccgcgccgggatgaagaaggaggccgtccagaacgagcgggaccgcatctccacccggcgcgcggcctacgaggacagctccctgcccagcatcaacgcgctcctgcaggccgaggtgctgtcccggcagatcaccagccccgtgtccggcatcaacggggacatccgcgccaagaagatcgccagcatcgccgacgtctgcgagagcatgaaggagcagctcctggtgctggtggagtgggcgaagtacatcccggccttctgcgagctccccctggacgaccaggtcgccctgctccgggcccacgccggcgagcacctcctgctgggggcgaccaagcgctccatggtgttcaaggacgtgctgctgctcggcaacgactacatcgtcccccggcactgccccgagctggccgagatgagccgcgtgtccatccggatcctggacgagctcgtgctgccgttccaggagctgcagatcgacgacaacgagtacgcctacctcaaggccatcatcttcttcgaccccgacgccaagggcctgagcgaccccgggaagatcaagcgcctgcgctcccaggtccaggtgagcctcgaggactacatcaacgaccggcagtacgactcccgcggccggttcggggagctgctgctcctgctgcccacgctccagagcatcacctggcagatgatcgagcagatccagttcatcaagctgttcggcatggcgaagatcgacaacctgctccaggagatgctgctgggcgggtccccgagcgacgcgccccacgcccaccaccccctccacccccacctgatgcaggagcacatgggcaccaacgtgatcgtcgccaacaccatgccgacgcacctgtccaacgggcagatgtgcgagtggccccgcccccggggccaggccgccacccccgagaccccgcagcccagcccgcccgggggctccggcagcgagccctacaagctgctccccggggccgtggccaccatcgtgaagcccctgtccgccatcccccagccgacgatcaccaagcaggaggtcatcgcctatccttatgatgttcctgattatgcagcctacccctacgacgtgccggactacgccgcctacccctatgacgtgcctgattacgccgcgtgaggactagtccctgttcccagagcccacttttttttctttttttgaaataaaatagcctgtctttcagatctcaaaggctcttttcagagccaccaaaaaaaaaaaaaaaaaaaaaaaaaaaaaaaaaaaaaaaaaaaaaaaaaaaaaaaaaaaaaaaaaaaaaaaaaaaaaaaaaaaaaaaaaaaaaaaaaaaaa

SEQ ID NO: 5568 - RNA, 1790 nt, synthetic construct
  misc_feature 1..1790: note = mRNA a-1 (hSL-A100) (opt1) from Homo sapiens__NP_000448.3__HNF4A(1-474)(S142E_S143E)_HA-tag R9460
  source 1..1790: mol_type = other RNA
aggagagtcccgcagtcggcgtccagcggctctgcttgttcgtgtgtgtgtcgttgcaggccttattcaagcttaccatgcgcctgagcaagaccctcgtggacatggacatggccgactactccgccgcgctggaccccgcctacaccacgctggagttcgagaacgtccaggtgctcaccatgggcaacgacaccagcccgtccgaggggaccaacctgaacgcccccaacagcctgggcgtgtccgccctctgcgccatctgcggggaccgggcgacgggcaagcactacggggccagctcctgcgacggctgcaagggcttcttccgccggagcgtccgcaagaaccacatgtactcctgccggttcagccgccagtgcgtggtggacaaggacaagcggaaccagtgccgctactgccggctgaagaagtgcttccgcgccgggatgaagaaggaggccgtccagaacgagcgggaccgcatctccacccggcgcgaggagtacgaggacagctccctgcccagcatcaacgcgctcctgcaggccgaggtgctgtcccggcagatcaccagccccgtgtccggcatcaacggggacatccgcgccaagaagatcgccagcatcgccgacgtctgcgagagcatgaaggagcagctcctggtgctggtggagtgggcgaagtacatcccggccttctgcgagctccccctggacgaccaggtcgccctgctccgggcccacgccggcgagcacctcctgctgggggcgaccaagcgctccatggtgttcaaggacgtgctgctgctcggcaacgactacatcgtcccccggcactgccccgagctggccgagatgagccgcgtgtccatccggatcctggacgagctcgtgctgccgttccaggagctgcagatcgacgacaacgagtacgcctacctcaaggccatcatcttcttcgaccccgacgccaagggcctgagcgaccccgggaagatcaagcgcctgcgctcccaggtccaggtgagcctcgaggactacatcaacgaccggcagtacgactcccgcggccggttcggggagctgctgctcctgctgcccacgctccagagcatcacctggcagatgatcgagcagatccagttcatcaagctgttcggcatggcgaagatcgacaacctgctccaggagatgctgctgggcgggtccccgagcgacgcgccccacgcccaccaccccctccacccccacctgatgcaggagcacatgggcaccaacgtgatcgtcgccaacaccatgccgacgcacctgtccaacgggcagatgtgcgagtggccccgcccccggggccaggccgccacccccgagaccccgcagcccagcccgcccgggggctccggcagcgagccctacaagctgctccccggggccgtggccaccatcgtgaagcccctgtccgccatcccccagccgacgatcaccaagcaggaggtcatcgcctatccttatgatgttcctgattatgcagcctacccctacgacgtgccggactacgccgcctacccctatgacgtgcctgattacgccgcgtgaggactagtccctgttcccagagcccacttttttttctttttttgaaataaaatagcctgtctttcagatctcaaaggctcttttcagagccaccaaaaaaaaaaaaaaaaaaaaaaaaaaaaaaaaaaaaaaaaaaaaaaaaaaaaaaaaaaaaaaaaaaaaaaaaaaaaaaaaaaaaaaaaaaaaaaaaaaaaa

SEQ ID NO: 5569 - RNA, 1790 nt, synthetic construct
  misc_feature 1..1790: note = mRNA a-1 (hSL-A100) (opt1) from Homo sapiens__NP_000448.3__HNF4A(1-474)(S143A)_HA-tag R9461
  source 1..1790: mol_type = other RNA
aggagagtcccgcagtcggcgtccagcggctctgcttgttcgtgtgtgtgtcgttgcaggccttattcaagcttaccatgcgcctgagcaagaccctcgtggacatggacatggccgactactccgccgcgctggaccccgcctacaccacgctggagttcgagaacgtccaggtgctcaccatgggcaacgacaccagcccgtccgaggggaccaacctgaacgcccccaacagcctgggcgtgtccgccctctgcgccatctgcggggaccgggcgacgggcaagcactacggggccagctcctgcgacggctgcaagggcttcttccgccggagcgtccgcaagaaccacatgtactcctgccggttcagccgccagtgcgtggtggacaaggacaagcggaaccagtgccgctactgccggctgaagaagtgcttccgcgccgggatgaagaaggaggccgtccagaacgagcgggaccgcatctccacccggcgcagcgcgtacgaggacagctccctgcccagcatcaacgcgctcctgcaggccgaggtgctgtcccggcagatcaccagccccgtgtccggcatcaacggggacatccgcgccaagaagatcgccagcatcgccgacgtctgcgagagcatgaaggagcagctcctggtgctggtggagtgggcgaagtacatcccggccttctgcgagctccccctggacgaccaggtcgccctgctccgggcccacgccggcgagcacctcctgctgggggcgaccaagcgctccatggtgttcaaggacgtgctgctgctcggcaacgactacatcgtcccccggcactgccccgagctggccgagatgagccgcgtgtccatccggatcctggacgagctcgtgctgccgttccaggagctgcagatcgacgacaacgagtacgcctacctcaaggccatcatcttcttcgaccccgacgccaagggcctgagcgaccccgggaagatcaagcgcctgcgctcccaggtccaggtgagcctcgaggactacatcaacgaccggcagtacgactcccgcggccggttcggggagctgctgctcctgctgcccacgctccagagcatcacctggcagatgatcgagcagatccagttcatcaagctgttcggcatggcgaagatcgacaacctgctccaggagatgctgctgggcgggtccccgagcgacgcgccccacgcccaccaccccctccacccccacctgatgcaggagcacatgggcaccaacgtgatcgtcgccaacaccatgccgacgcacctgtccaacgggcagatgtgcgagtggccccgcccccggggccaggccgccacccccgagaccccgcagcccagcccgcccgggggctccggcagcgagccctacaagctgctccccggggccgtggccaccatcgtgaagcccctgtccgccatcccccagccgacgatcaccaagcaggaggtcatcgcctatccttatgatgttcctgattatgcagcctacccctacgacgtgccggactacgccgcctacccctatgacgtgcctgattacgccgcgtgaggactagtccctgttcccagagcccacttttttttctttttttgaaataaaatagcctgtctttcagatctcaaaggctcttttcagagccaccaaaaaaaaaaaaaaaaaaaaaaaaaaaaaaaaaaaaaaaaaaaaaaaaaaaaaaaaaaaaaaaaaaaaaaaaaaaaaaaaaaaaaaaaaaaaaaaaaaaaa

SEQ ID NO: 5570 - RNA, 1790 nt, synthetic construct
  misc_feature 1..1790: note = mRNA a-1 (hSL-A100) (opt1) from Homo sapiens__NP_000448.3__HNF4A(1-474)(T166A)_HA-tag R9462
  source 1..1790: mol_type = other RNA
aggagagtcccgcagtcggcgtccagcggctctgcttgttcgtgtgtgtgtcgttgcaggccttattcaagcttaccatgcgcctgagcaagaccctcgtggacatggacatggccgactactccgccgcgctggaccccgcctacaccacgctggagttcgagaacgtccaggtgctcaccatgggcaacgacaccagcccgtccgaggggaccaacctgaacgcccccaacagcctgggcgtgtccgccctctgcgccatctgcggggaccgggcgacgggcaagcactacggggccagctcctgcgacggctgcaagggcttcttccgccggagcgtccgcaagaaccacatgtactcctgccggttcagccgccagtgcgtggtggacaaggacaagcggaaccagtgccgctactgccggctgaagaagtgcttccgcgccgggatgaagaaggaggccgtccagaacgagcgggaccgcatctccacccggcgcagctcctacgaggacagctccctgcccagcatcaacgcgctcctgcaggccgaggtgctgtcccggcagatcgcgagccccgtgtccggcatcaacggggacatccgcgccaagaagatcgccagcatcgccgacgtctgcgagagcatgaaggagcagctcctggtgctggtggagtgggcgaagtacatcccggccttctgcgagctccccctggacgaccaggtcgccctgctccgggcccacgccggcgagcacctcctgctgggggcgaccaagcgctccatggtgttcaaggacgtgctgctgctcggcaacgactacatcgtcccccggcactgccccgagctggccgagatgagccgcgtgtccatccggatcctggacgagctcgtgctgccgttccaggagctgcagatcgacgacaacgagtacgcctacctcaaggccatcatcttcttcgaccccgacgccaagggcctgagcgaccccgggaagatcaagcgcctgcgctcccaggtccaggtgagcctcgaggactacatcaacgaccggcagtacgactcccgcggccggttcggggagctgctgctcctgctgcccacgctccagagcatcacctggcagatgatcgagcagatccagttcatcaagctgttcggcatggcgaagatcgacaacctgctccaggagatgctgctgggcgggtccccgagcgacgcgccccacgcccaccaccccctccacccccacctgatgcaggagcacatgggcaccaacgtgatcgtcgccaacaccatgccgacgcacctgtccaacgggcagatgtgcgagtggccccgcccccggggccaggccgccacccccgagaccccgcagcccagcccgcccgggggctccggcagcgagccctacaagctgctccccggggccgtggccaccatcgtgaagcccctgtccgccatcccccagccgacgatcaccaagcaggaggtcatcgcctatccttatgatgttcctgattatgcagcctacccctacgacgtgccggactacgccgcctacccctatgacgtgcctgattacgccgcgtgaggactagtccctgttcccagagcccacttttttttctttttttgaaataaaatagcctgtctttcagatctcaaaggctcttttcagagccaccaaaaaaaaaaaaaaaaaaaaaaaaaaaaaaaaaaaaaaaaaaaaaaaaaaaaaaaaaaaaaaaaaaaaaaaaaaaaaaaaaaaaaaaaaaaaaaaaaaaaa

SEQ ID NO: 5571 - RNA, 1790 nt, synthetic construct
  misc_feature 1..1790: note = mRNA a-1 (hSL-A100) (opt1) from Homo sapiens__NP_000448.3__HNF4A(1-474)(S167E)_HA-tag R9463
  source 1..1790: mol_type = other RNA
aggagagtcccgcagtcggcgtccagcggctctgcttgttcgtgtgtgtgtcgttgcaggccttattcaagcttaccatgcgcctgagcaagaccctcgtggacatggacatggccgactactccgccgcgctggaccccgcctacaccacgctggagttcgagaacgtccaggtgctcaccatgggcaacgacaccagcccgtccgaggggaccaacctgaacgcccccaacagcctgggcgtgtccgccctctgcgccatctgcggggaccgggcgacgggcaagcactacggggccagctcctgcgacggctgcaagggcttcttccgccggagcgtccgcaagaaccacatgtactcctgccggttcagccgccagtgcgtggtggacaaggacaagcggaaccagtgccgctactgccggctgaagaagtgcttccgcgccgggatgaagaaggaggccgtccagaacgagcgggaccgcatctccacccggcgcagctcctacgaggacagctccctgcccagcatcaacgcgctcctgcaggccgaggtgctgtcccggcagatcaccgagcccgtgtccggcatcaacggggacatccgcgccaagaagatcgccagcatcgccgacgtctgcgagagcatgaaggagcagctcctggtgctggtggagtgggcgaagtacatcccggccttctgcgagctccccctggacgaccaggtcgccctgctccgggcccacgccggcgagcacctcctgctgggggcgaccaagcgctccatggtgttcaaggacgtgctgctgctcggcaacgactacatcgtcccccggcactgccccgagctggccgagatgagccgcgtgtccatccggatcctggacgagctcgtgctgccgttccaggagctgcagatcgacgacaacgagtacgcctacctcaaggccatcatcttcttcgaccccgacgccaagggcctgagcgaccccgggaagatcaagcgcctgcgctcccaggtccaggtgagcctcgaggactacatcaacgaccggcagtacgactcccgcggccggttcggggagctgctgctcctgctgcccacgctccagagcatcacctggcagatgatcgagcagatccagttcatcaagctgttcggcatggcgaagatcgacaacctgctccaggagatgctgctgggcgggtccccgagcgacgcgccccacgcccaccaccccctccacccccacctgatgcaggagcacatgggcaccaacgtgatcgtcgccaacaccatgccgacgcacctgtccaacgggcagatgtgcgagtggccccgcccccggggccaggccgccacccccgagaccccgcagcccagcccgcccgggggctccggcagcgagccctacaagctgctccccggggccgtggccaccatcgtgaagcccctgtccgccatcccccagccgacgatcaccaagcaggaggtcatcgcctatccttatgatgttcctgattatgcagcctacccctacgacgtgccggactacgccgcctacccctatgacgtgcctgattacgccgcgtgaggactagtccctgttcccagagcccacttttttttctttttttgaaataaaatagcctgtctttcagatctcaaaggctcttttcagagccaccaaaaaaaaaaaaaaaaaaaaaaaaaaaaaaaaaaaaaaaaaaaaaaaaaaaaaaaaaaaaaaaaaaaaaaaaaaaaaaaaaaaaaaaaaaaaaaaaaaaaa

SEQ ID NO: 5572 - RNA, 1790 nt, synthetic construct
  misc_feature 1..1790: note = mRNA a-1 (hSL-A100) (opt1) from Homo sapiens__NP_000448.3__HNF4A(1-474)(S167A)_HA-tag R9464
  source 1..1790: mol_type = other RNA
aggagagtcccgcagtcggcgtccagcggctctgcttgttcgtgtgtgtgtcgttgcaggccttattcaagcttaccatgcgcctgagcaagaccctcgtggacatggacatggccgactactccgccgcgctggaccccgcctacaccacgctggagttcgagaacgtccaggtgctcaccatgggcaacgacaccagcccgtccgaggggaccaacctgaacgcccccaacagcctgggcgtgtccgccctctgcgccatctgcggggaccgggcgacgggcaagcactacggggccagctcctgcgacggctgcaagggcttcttccgccggagcgtccgcaagaaccacatgtactcctgccggttcagccgccagtgcgtggtggacaaggacaagcggaaccagtgccgctactgccggctgaagaagtgcttccgcgccgggatgaagaaggaggccgtccagaacgagcgggaccgcatctccacccggcgcagctcctacgaggacagctccctgcccagcatcaacgcgctcctgcaggccgaggtgctgtcccggcagatcaccgcgcccgtgtccggcatcaacggggacatccgcgccaagaagatcgccagcatcgccgacgtctgcgagagcatgaaggagcagctcctggtgctggtggagtgggcgaagtacatcccggccttctgcgagctccccctggacgaccaggtcgccctgctccgggcccacgccggcgagcacctcctgctgggggcgaccaagcgctccatggtgttcaaggacgtgctgctgctcggcaacgactacatcgtcccccggcactgccccgagctggccgagatgagccgcgtgtccatccggatcctggacgagctcgtgctgccgttccaggagctgcagatcgacgacaacgagtacgcctacctcaaggccatcatcttcttcgaccccgacgccaagggcctgagcgaccccgggaagatcaagcgcctgcgctcccaggtccaggtgagcctcgaggactacatcaacgaccggcagtacgactcccgcggccggttcggggagctgctgctcctgctgcccacgctccagagcatcacctggcagatgatcgagcagatccagttcatcaagctgttcggcatggcgaagatcgacaacctgctccaggagatgctgctgggcgggtccccgagcgacgcgccccacgcccaccaccccctccacccccacctgatgcaggagcacatgggcaccaacgtgatcgtcgccaacaccatgccgacgcacctgtccaacgggcagatgtgcgagtggccccgcccccggggccaggccgccacccccgagaccccgcagcccagcccgcccgggggctccggcagcgagccctacaagctgctccccggggccgtggccaccatcgtgaagcccctgtccgccatcccccagccgacgatcaccaagcaggaggtcatcgcctatccttatgatgttcctgattatgcagcctacccctacgacgtgccggactacgccgcctacccctatgacgtgcctgattacgccgcgtgaggactagtccctgttcccagagcccacttttttttctttttttgaaataaaatagcctgtctttcagatctcaaaggctcttttcagagccaccaaaaaaaaaaaaaaaaaaaaaaaaaaaaaaaaaaaaaaaaaaaaaaaaaaaaaaaaaaaaaaaaaaaaaaaaaaaaaaaaaaaaaaaaaaaaaaaaaaaaa

SEQ ID NO: 5573 - RNA, 1790 nt, synthetic construct
  misc_feature 1..1790: note = mRNA a-1 (hSL-A100) (opt1) from Homo sapiens__NP_000448.3__HNF4A(1-474)(S167A_S378A_T429A_T432A_ S436A)_HA-tag R9465
  source 1..1790: mol_type = other RNA
aggagagtcccgcagtcggcgtccagcggctctgcttgttcgtgtgtgtgtcgttgcaggccttattcaagcttaccatgcgcctgagcaagaccctcgtggacatggacatggccgactactccgccgcgctggaccccgcctacaccacgctggagttcgagaacgtccaggtgctcaccatgggcaacgacaccagcccgtccgaggggaccaacctgaacgcccccaacagcctgggcgtgtccgccctctgcgccatctgcggggaccgggcgacgggcaagcactacggggccagctcctgcgacggctgcaagggcttcttccgccggagcgtccgcaagaaccacatgtactcctgccggttcagccgccagtgcgtggtggacaaggacaagcggaaccagtgccgctactgccggctgaagaagtgcttccgcgccgggatgaagaaggaggccgtccagaacgagcgggaccgcatctccacccggcgcagctcctacgaggacagctccctgcccagcatcaacgcgctcctgcaggccgaggtgctgtcccggcagatcaccgcgcccgtgtccggcatcaacggggacatccgcgccaagaagatcgccagcatcgccgacgtctgcgagagcatgaaggagcagctcctggtgctggtggagtgggcgaagtacatcccggccttctgcgagctccccctggacgaccaggtcgccctgctccgggcccacgccggcgagcacctcctgctgggggcgaccaagcgctccatggtgttcaaggacgtgctgctgctcggcaacgactacatcgtcccccggcactgccccgagctggccgagatgagccgcgtgtccatccggatcctggacgagctcgtgctgccgttccaggagctgcagatcgacgacaacgagtacgcctacctcaaggccatcatcttcttcgaccccgacgccaagggcctgagcgaccccgggaagatcaagcgcctgcgctcccaggtccaggtgagcctcgaggactacatcaacgaccggcagtacgactcccgcggccggttcggggagctgctgctcctgctgcccacgctccagagcatcacctggcagatgatcgagcagatccagttcatcaagctgttcggcatggcgaagatcgacaacctgctccaggagatgctgctgggcggggcgccgagcgacgcgccccacgcccaccaccccctccacccccacctgatgcaggagcacatgggcaccaacgtgatcgtcgccaacaccatgccgacgcacctgtccaacgggcagatgtgcgagtggccccgcccccggggccaggccgccgcgcccgaggcgccgcagcccgcgccgcccgggggctccggcagcgagccctacaagctgctccccggggccgtggccaccatcgtgaagcccctgtccgccatcccccagccgacgatcaccaagcaggaggtcatcgcctatccttatgatgttcctgattatgcagcctacccctacgacgtgccggactacgccgcctacccctatgacgtgcctgattacgccgcgtgaggactagtccctgttcccagagcccacttttttttctttttttgaaataaaatagcctgtctttcagatctcaaaggctcttttcagagccaccaaaaaaaaaaaaaaaaaaaaaaaaaaaaaaaaaaaaaaaaaaaaaaaaaaaaaaaaaaaaaaaaaaaaaaaaaaaaaaaaaaaaaaaaaaaaaaaaaaaaa

SEQ ID NO: 5574 - RNA, 1790 nt, synthetic construct
  misc_feature 1..1790: note = mRNA a-1 (hSL-A100) (opt1) from Homo sapiens__NP_000448.3__HNF4A(1-474)(S167E_S378E_T429E_T432E_ S436E)_HA-tag R9466
  source 1..1790: mol_type = other RNA
aggagagtcccgcagtcggcgtccagcggctctgcttgttcgtgtgtgtgtcgttgcaggccttattcaagcttaccatgcgcctgagcaagaccctcgtggacatggacatggccgactactccgccgcgctggaccccgcctacaccacgctggagttcgagaacgtccaggtgctcaccatgggcaacgacaccagcccgtccgaggggaccaacctgaacgcccccaacagcctgggcgtgtccgccctctgcgccatctgcggggaccgggcgacgggcaagcactacggggccagctcctgcgacggctgcaagggcttcttccgccggagcgtccgcaagaaccacatgtactcctgccggttcagccgccagtgcgtggtggacaaggacaagcggaaccagtgccgctactgccggctgaagaagtgcttccgcgccgggatgaagaaggaggccgtccagaacgagcgggaccgcatctccacccggcgcagctcctacgaggacagctccctgcccagcatcaacgcgctcctgcaggccgaggtgctgtcccggcagatcaccgagcccgtgtccggcatcaacggggacatccgcgccaagaagatcgccagcatcgccgacgtctgcgagagcatgaaggagcagctcctggtgctggtggagtgggcgaagtacatcccggccttctgcgagctccccctggacgaccaggtcgccctgctccgggcccacgccggcgagcacctcctgctgggggcgaccaagcgctccatggtgttcaaggacgtgctgctgctcggcaacgactacatcgtcccccggcactgccccgagctggccgagatgagccgcgtgtccatccggatcctggacgagctcgtgctgccgttccaggagctgcagatcgacgacaacgagtacgcctacctcaaggccatcatcttcttcgaccccgacgccaagggcctgagcgaccccgggaagatcaagcgcctgcgctcccaggtccaggtgagcctcgaggactacatcaacgaccggcagtacgactcccgcggccggttcggggagctgctgctcctgctgcccacgctccagagcatcacctggcagatgatcgagcagatccagttcatcaagctgttcggcatggcgaagatcgacaacctgctccaggagatgctgctgggcggggagccgagcgacgcgccccacgcccaccaccccctccacccccacctgatgcaggagcacatgggcaccaacgtgatcgtcgccaacaccatgccgacgcacctgtccaacgggcagatgtgcgagtggccccgcccccggggccaggccgccgagcccgaggagccgcagcccgagccgcccgggggctccggcagcgagccctacaagctgctccccggggccgtggccaccatcgtgaagcccctgtccgccatcccccagccgacgatcaccaagcaggaggtcatcgcctatccttatgatgttcctgattatgcagcctacccctacgacgtgccggactacgccgcctacccctatgacgtgcctgattacgccgcgtgaggactagtccctgttcccagagcccacttttttttctttttttgaaataaaatagcctgtctttcagatctcaaaggctcttttcagagccaccaaaaaaaaaaaaaaaaaaaaaaaaaaaaaaaaaaaaaaaaaaaaaaaaaaaaaaaaaaaaaaaaaaaaaaaaaaaaaaaaaaaaaaaaaaaaaaaaaaaaa

SEQ ID NO: 5575 - RNA, 1790 nt, synthetic construct
  misc_feature 1..1790: note = mRNA a-1 (hSL-A100) (opt1) from Homo sapiens__NP_000448.3__HNF4A(1-474)(S87A)_HA-tag R9467
  source 1..1790: mol_type = other RNA
aggagagtcccgcagtcggcgtccagcggctctgcttgttcgtgtgtgtgtcgttgcaggccttattcaagcttaccatgcgcctgagcaagaccctcgtggacatggacatggccgactactccgccgcgctggaccccgcctacaccacgctggagttcgagaacgtccaggtgctcaccatgggcaacgacaccagcccgtccgaggggaccaacctgaacgcccccaacagcctgggcgtgtccgccctctgcgccatctgcggggaccgggcgacgggcaagcactacggggccagctcctgcgacggctgcaagggcttcttccgccgggcggtccgcaagaaccacatgtactcctgccggttcagccgccagtgcgtggtggacaaggacaagcggaaccagtgccgctactgccggctgaagaagtgcttccgcgccgggatgaagaaggaggccgtccagaacgagcgggaccgcatctccacccggcgcagctcctacgaggacagctccctgcccagcatcaacgcgctcctgcaggccgaggtgctgtcccggcagatcaccagccccgtgtccggcatcaacggggacatccgcgccaagaagatcgccagcatcgccgacgtctgcgagagcatgaaggagcagctcctggtgctggtggagtgggcgaagtacatcccggccttctgcgagctccccctggacgaccaggtcgccctgctccgggcccacgccggcgagcacctcctgctgggggcgaccaagcgctccatggtgttcaaggacgtgctgctgctcggcaacgactacatcgtcccccggcactgccccgagctggccgagatgagccgcgtgtccatccggatcctggacgagctcgtgctgccgttccaggagctgcagatcgacgacaacgagtacgcctacctcaaggccatcatcttcttcgaccccgacgccaagggcctgagcgaccccgggaagatcaagcgcctgcgctcccaggtccaggtgagcctcgaggactacatcaacgaccggcagtacgactcccgcggccggttcggggagctgctgctcctgctgcccacgctccagagcatcacctggcagatgatcgagcagatccagttcatcaagctgttcggcatggcgaagatcgacaacctgctccaggagatgctgctgggcgggtccccgagcgacgcgccccacgcccaccaccccctccacccccacctgatgcaggagcacatgggcaccaacgtgatcgtcgccaacaccatgccgacgcacctgtccaacgggcagatgtgcgagtggccccgcccccggggccaggccgccacccccgagaccccgcagcccagcccgcccgggggctccggcagcgagccctacaagctgctccccggggccgtggccaccatcgtgaagcccctgtccgccatcccccagccgacgatcaccaagcaggaggtcatcgcctatccttatgatgttcctgattatgcagcctacccctacgacgtgccggactacgccgcctacccctatgacgtgcctgattacgccgcgtgaggactagtccctgttcccagagcccacttttttttctttttttgaaataaaatagcctgtctttcagatctcaaaggctcttttcagagccaccaaaaaaaaaaaaaaaaaaaaaaaaaaaaaaaaaaaaaaaaaaaaaaaaaaaaaaaaaaaaaaaaaaaaaaaaaaaaaaaaaaaaaaaaaaaaaaaaaaaaa

SEQ ID NO: 5576 - RNA, 1790 nt, synthetic construct
  misc_feature 1..1790: note = mRNA a-1 (hSL-A100) (opt1) from Homo sapiens__NP_000448.3__HNF4A(1-474)(S87E)_HA-tag R9468
  source 1..1790: mol_type = other RNA
aggagagtcccgcagtcggcgtccagcggctctgcttgttcgtgtgtgtgtcgttgcaggccttattcaagcttaccatgcgcctgagcaagaccctcgtggacatggacatggccgactactccgccgcgctggaccccgcctacaccacgctggagttcgagaacgtccaggtgctcaccatgggcaacgacaccagcccgtccgaggggaccaacctgaacgcccccaacagcctgggcgtgtccgccctctgcgccatctgcggggaccgggcgacgggcaagcactacggggccagctcctgcgacggctgcaagggcttcttccgccgggaggtccgcaagaaccacatgtactcctgccggttcagccgccagtgcgtggtggacaaggacaagcggaaccagtgccgctactgccggctgaagaagtgcttccgcgccgggatgaagaaggaggccgtccagaacgagcgggaccgcatctccacccggcgcagctcctacgaggacagctccctgcccagcatcaacgcgctcctgcaggccgaggtgctgtcccggcagatcaccagccccgtgtccggcatcaacggggacatccgcgccaagaagatcgccagcatcgccgacgtctgcgagagcatgaaggagcagctcctggtgctggtggagtgggcgaagtacatcccggccttctgcgagctccccctggacgaccaggtcgccctgctccgggcccacgccggcgagcacctcctgctgggggcgaccaagcgctccatggtgttcaaggacgtgctgctgctcggcaacgactacatcgtcccccggcactgccccgagctggccgagatgagccgcgtgtccatccggatcctggacgagctcgtgctgccgttccaggagctgcagatcgacgacaacgagtacgcctacctcaaggccatcatcttcttcgaccccgacgccaagggcctgagcgaccccgggaagatcaagcgcctgcgctcccaggtccaggtgagcctcgaggactacatcaacgaccggcagtacgactcccgcggccggttcggggagctgctgctcctgctgcccacgctccagagcatcacctggcagatgatcgagcagatccagttcatcaagctgttcggcatggcgaagatcgacaacctgctccaggagatgctgctgggcgggtccccgagcgacgcgccccacgcccaccaccccctccacccccacctgatgcaggagcacatgggcaccaacgtgatcgtcgccaacaccatgccgacgcacctgtccaacgggcagatgtgcgagtggccccgcccccggggccaggccgccacccccgagaccccgcagcccagcccgcccgggggctccggcagcgagccctacaagctgctccccggggccgtggccaccatcgtgaagcccctgtccgccatcccccagccgacgatcaccaagcaggaggtcatcgcctatccttatgatgttcctgattatgcagcctacccctacgacgtgccggactacgccgcctacccctatgacgtgcctgattacgccgcgtgaggactagtccctgttcccagagcccacttttttttctttttttgaaataaaatagcctgtctttcagatctcaaaggctcttttcagagccaccaaaaaaaaaaaaaaaaaaaaaaaaaaaaaaaaaaaaaaaaaaaaaaaaaaaaaaaaaaaaaaaaaaaaaaaaaaaaaaaaaaaaaaaaaaaaaaaaaaaaa

SEQ ID NO: 5577 - RNA, 1790 nt, synthetic construct
  misc_feature 1..1790: note = mRNA a-1 (hSL-A100) (opt1) from Homo sapiens__NP_000448.3__HNF4A(1-474)(R2V)_HA-tag R9469
  source 1..1790: mol_type = other RNA
aggagagtcccgcagtcggcgtccagcggctctgcttgttcgtgtgtgtgtcgttgcaggccttattcaagcttaccatggtgctgagcaagaccctcgtggacatggacatggccgactactccgccgcgctggaccccgcctacaccacgctggagttcgagaacgtccaggtgctcaccatgggcaacgacaccagcccgtccgaggggaccaacctgaacgcccccaacagcctgggcgtgtccgccctctgcgccatctgcggggaccgggcgacgggcaagcactacggggccagctcctgcgacggctgcaagggcttcttccgccggagcgtccgcaagaaccacatgtactcctgccggttcagccgccagtgcgtggtggacaaggacaagcggaaccagtgccgctactgccggctgaagaagtgcttccgcgccgggatgaagaaggaggccgtccagaacgagcgggaccgcatctccacccggcgcagctcctacgaggacagctccctgcccagcatcaacgcgctcctgcaggccgaggtgctgtcccggcagatcaccagccccgtgtccggcatcaacggggacatccgcgccaagaagatcgccagcatcgccgacgtctgcgagagcatgaaggagcagctcctggtgctggtggagtgggcgaagtacatcccggccttctgcgagctccccctggacgaccaggtcgccctgctccgggcccacgccggcgagcacctcctgctgggggcgaccaagcgctccatggtgttcaaggacgtgctgctgctcggcaacgactacatcgtcccccggcactgccccgagctggccgagatgagccgcgtgtccatccggatcctggacgagctcgtgctgccgttccaggagctgcagatcgacgacaacgagtacgcctacctcaaggccatcatcttcttcgaccccgacgccaagggcctgagcgaccccgggaagatcaagcgcctgcgctcccaggtccaggtgagcctcgaggactacatcaacgaccggcagtacgactcccgcggccggttcggggagctgctgctcctgctgcccacgctccagagcatcacctggcagatgatcgagcagatccagttcatcaagctgttcggcatggcgaagatcgacaacctgctccaggagatgctgctgggcgggtccccgagcgacgcgccccacgcccaccaccccctccacccccacctgatgcaggagcacatgggcaccaacgtgatcgtcgccaacaccatgccgacgcacctgtccaacgggcagatgtgcgagtggccccgcccccggggccaggccgccacccccgagaccccgcagcccagcccgcccgggggctccggcagcgagccctacaagctgctccccggggccgtggccaccatcgtgaagcccctgtccgccatcccccagccgacgatcaccaagcaggaggtcatcgcctatccttatgatgttcctgattatgcagcctacccctacgacgtgccggactacgccgcctacccctatgacgtgcctgattacgccgcgtgaggactagtccctgttcccagagcccacttttttttctttttttgaaataaaatagcctgtctttcagatctcaaaggctcttttcagagccaccaaaaaaaaaaaaaaaaaaaaaaaaaaaaaaaaaaaaaaaaaaaaaaaaaaaaaaaaaaaaaaaaaaaaaaaaaaaaaaaaaaaaaaaaaaaaaaaaaaaaa

SEQ ID NO: 5578 - RNA, 1790 nt, synthetic construct
  misc_feature 1..1790: note = mRNA a-1 (hSL-A100) (opt1) from Homo sapiens__NP_000448.3__HNF4A(1-474)(R2V_K5V)_HA-tag R9470
  source 1..1790: mol_type = other RNA
aggagagtcccgcagtcggcgtccagcggctctgcttgttcgtgtgtgtgtcgttgcaggccttattcaagcttaccatggtgctgagcgtgaccctcgtggacatggacatggccgactactccgccgcgctggaccccgcctacaccacgctggagttcgagaacgtccaggtgctcaccatgggcaacgacaccagcccgtccgaggggaccaacctgaacgcccccaacagcctgggcgtgtccgccctctgcgccatctgcggggaccgggcgacgggcaagcactacggggccagctcctgcgacggctgcaagggcttcttccgccggagcgtccgcaagaaccacatgtactcctgccggttcagccgccagtgcgtggtggacaaggacaagcggaaccagtgccgctactgccggctgaagaagtgcttccgcgccgggatgaagaaggaggccgtccagaacgagcgggaccgcatctccacccggcgcagctcctacgaggacagctccctgcccagcatcaacgcgctcctgcaggccgaggtgctgtcccggcagatcaccagccccgtgtccggcatcaacggggacatccgcgccaagaagatcgccagcatcgccgacgtctgcgagagcatgaaggagcagctcctggtgctggtggagtgggcgaagtacatcccggccttctgcgagctccccctggacgaccaggtcgccctgctccgggcccacgccggcgagcacctcctgctgggggcgaccaagcgctccatggtgttcaaggacgtgctgctgctcggcaacgactacatcgtcccccggcactgccccgagctggccgagatgagccgcgtgtccatccggatcctggacgagctcgtgctgccgttccaggagctgcagatcgacgacaacgagtacgcctacctcaaggccatcatcttcttcgaccccgacgccaagggcctgagcgaccccgggaagatcaagcgcctgcgctcccaggtccaggtgagcctcgaggactacatcaacgaccggcagtacgactcccgcggccggttcggggagctgctgctcctgctgcccacgctccagagcatcacctggcagatgatcgagcagatccagttcatcaagctgttcggcatggcgaagatcgacaacctgctccaggagatgctgctgggcgggtccccgagcgacgcgccccacgcccaccaccccctccacccccacctgatgcaggagcacatgggcaccaacgtgatcgtcgccaacaccatgccgacgcacctgtccaacgggcagatgtgcgagtggccccgcccccggggccaggccgccacccccgagaccccgcagcccagcccgcccgggggctccggcagcgagccctacaagctgctccccggggccgtggccaccatcgtgaagcccctgtccgccatcccccagccgacgatcaccaagcaggaggtcatcgcctatccttatgatgttcctgattatgcagcctacccctacgacgtgccggactacgccgcctacccctatgacgtgcctgattacgccgcgtgaggactagtccctgttcccagagcccacttttttttctttttttgaaataaaatagcctgtctttcagatctcaaaggctcttttcagagccaccaaaaaaaaaaaaaaaaaaaaaaaaaaaaaaaaaaaaaaaaaaaaaaaaaaaaaaaaaaaaaaaaaaaaaaaaaaaaaaaaaaaaaaaaaaaaaaaaaaaaa

SEQ ID NO: 5579 - RNA, 1790 nt, synthetic construct
  misc_feature 1..1790: note = mRNA a-1 (hSL-A100) (opt1) from Homo sapiens__NP_000448.3__HNF4A(1-474)(K179R_K180R)_HA-tag R9471
  source 1..1790: mol_type = other RNA
aggagagtcccgcagtcggcgtccagcggctctgcttgttcgtgtgtgtgtcgttgcaggccttattcaagcttaccatgcgcctgagcaagaccctcgtggacatggacatggccgactactccgccgcgctggaccccgcctacaccacgctggagttcgagaacgtccaggtgctcaccatgggcaacgacaccagcccgtccgaggggaccaacctgaacgcccccaacagcctgggcgtgtccgccctctgcgccatctgcggggaccgggcgacgggcaagcactacggggccagctcctgcgacggctgcaagggcttcttccgccggagcgtccgcaagaaccacatgtactcctgccggttcagccgccagtgcgtggtggacaaggacaagcggaaccagtgccgctactgccggctgaagaagtgcttccgcgccgggatgaagaaggaggccgtccagaacgagcgggaccgcatctccacccggcgcagctcctacgaggacagctccctgcccagcatcaacgcgctcctgcaggccgaggtgctgtcccggcagatcaccagccccgtgtccggcatcaacggggacatccgcgcccggcgcatcgccagcatcgccgacgtctgcgagagcatgaaggagcagctcctggtgctggtggagtgggcgaagtacatcccggccttctgcgagctccccctggacgaccaggtcgccctgctccgggcccacgccggcgagcacctcctgctgggggcgaccaagcgctccatggtgttcaaggacgtgctgctgctcggcaacgactacatcgtcccccggcactgccccgagctggccgagatgagccgcgtgtccatccggatcctggacgagctcgtgctgccgttccaggagctgcagatcgacgacaacgagtacgcctacctcaaggccatcatcttcttcgaccccgacgccaagggcctgagcgaccccgggaagatcaagcgcctgcgctcccaggtccaggtgagcctcgaggactacatcaacgaccggcagtacgactcccgcggccggttcggggagctgctgctcctgctgcccacgctccagagcatcacctggcagatgatcgagcagatccagttcatcaagctgttcggcatggcgaagatcgacaacctgctccaggagatgctgctgggcgggtccccgagcgacgcgccccacgcccaccaccccctccacccccacctgatgcaggagcacatgggcaccaacgtgatcgtcgccaacaccatgccgacgcacctgtccaacgggcagatgtgcgagtggccccgcccccggggccaggccgccacccccgagaccccgcagcccagcccgcccgggggctccggcagcgagccctacaagctgctccccggggccgtggccaccatcgtgaagcccctgtccgccatcccccagccgacgatcaccaagcaggaggtcatcgcctatccttatgatgttcctgattatgcagcctacccctacgacgtgccggactacgccgcctacccctatgacgtgcctgattacgccgcgtgaggactagtccctgttcccagagcccacttttttttctttttttgaaataaaatagcctgtctttcagatctcaaaggctcttttcagagccaccaaaaaaaaaaaaaaaaaaaaaaaaaaaaaaaaaaaaaaaaaaaaaaaaaaaaaaaaaaaaaaaaaaaaaaaaaaaaaaaaaaaaaaaaaaaaaaaaaaaaa

SEQ ID NO: 5580 - RNA, 1790 nt, synthetic construct
  misc_feature 1..1790: note = mRNA a-1 (hSL-A100) (opt1) from Homo sapiens__NP_000448.3__HNF4A(1-474)(K234R)_HA-tag R9472
  source 1..1790: mol_type = other RNA
aggagagtcccgcagtcggcgtccagcggctctgcttgttcgtgtgtgtgtcgttgcaggccttattcaagcttaccatgcgcctgagcaagaccctcgtggacatggacatggccgactactccgccgcgctggaccccgcctacaccacgctggagttcgagaacgtccaggtgctcaccatgggcaacgacaccagcccgtccgaggggaccaacctgaacgcccccaacagcctgggcgtgtccgccctctgcgccatctgcggggaccgggcgacgggcaagcactacggggccagctcctgcgacggctgcaagggcttcttccgccggagcgtccgcaagaaccacatgtactcctgccggttcagccgccagtgcgtggtggacaaggacaagcggaaccagtgccgctactgccggctgaagaagtgcttccgcgccgggatgaagaaggaggccgtccagaacgagcgggaccgcatctccacccggcgcagctcctacgaggacagctccctgcccagcatcaacgcgctcctgcaggccgaggtgctgtcccggcagatcaccagccccgtgtccggcatcaacggggacatccgcgccaagaagatcgccagcatcgccgacgtctgcgagagcatgaaggagcagctcctggtgctggtggagtgggcgaagtacatcccggccttctgcgagctccccctggacgaccaggtcgccctgctccgggcccacgccggcgagcacctcctgctgggggcgacccgccgctccatggtgttcaaggacgtgctgctgctcggcaacgactacatcgtcccccggcactgccccgagctggccgagatgagccgcgtgtccatccggatcctggacgagctcgtgctgccgttccaggagctgcagatcgacgacaacgagtacgcctacctcaaggccatcatcttcttcgaccccgacgccaagggcctgagcgaccccgggaagatcaagcgcctgcgctcccaggtccaggtgagcctcgaggactacatcaacgaccggcagtacgactcccgcggccggttcggggagctgctgctcctgctgcccacgctccagagcatcacctggcagatgatcgagcagatccagttcatcaagctgttcggcatggcgaagatcgacaacctgctccaggagatgctgctgggcgggtccccgagcgacgcgccccacgcccaccaccccctccacccccacctgatgcaggagcacatgggcaccaacgtgatcgtcgccaacaccatgccgacgcacctgtccaacgggcagatgtgcgagtggccccgcccccggggccaggccgccacccccgagaccccgcagcccagcccgcccgggggctccggcagcgagccctacaagctgctccccggggccgtggccaccatcgtgaagcccctgtccgccatcccccagccgacgatcaccaagcaggaggtcatcgcctatccttatgatgttcctgattatgcagcctacccctacgacgtgccggactacgccgcctacccctatgacgtgcctgattacgccgcgtgaggactagtccctgttcccagagcccacttttttttctttttttgaaataaaatagcctgtctttcagatctcaaaggctcttttcagagccaccaaaaaaaaaaaaaaaaaaaaaaaaaaaaaaaaaaaaaaaaaaaaaaaaaaaaaaaaaaaaaaaaaaaaaaaaaaaaaaaaaaaaaaaaaaaaaaaaaaaaa

SEQ ID NO: 5581 - RNA, 1790 nt, synthetic construct
  misc_feature 1..1790: note = mRNA a-1 (hSL-A100) (opt1) from Homo sapiens__NP_000448.3__HNF4A(1-474)(K300R)_HA-tag R9473
  source 1..1790: mol_type = other RNA
aggagagtcccgcagtcggcgtccagcggctctgcttgttcgtgtgtgtgtcgttgcaggccttattcaagcttaccatgcgcctgagcaagaccctcgtggacatggacatggccgactactccgccgcgctggaccccgcctacaccacgctggagttcgagaacgtccaggtgctcaccatgggcaacgacaccagcccgtccgaggggaccaacctgaacgcccccaacagcctgggcgtgtccgccctctgcgccatctgcggggaccgggcgacgggcaagcactacggggccagctcctgcgacggctgcaagggcttcttccgccggagcgtccgcaagaaccacatgtactcctgccggttcagccgccagtgcgtggtggacaaggacaagcggaaccagtgccgctactgccggctgaagaagtgcttccgcgccgggatgaagaaggaggccgtccagaacgagcgggaccgcatctccacccggcgcagctcctacgaggacagctccctgcccagcatcaacgcgctcctgcaggccgaggtgctgtcccggcagatcaccagccccgtgtccggcatcaacggggacatccgcgccaagaagatcgccagcatcgccgacgtctgcgagagcatgaaggagcagctcctggtgctggtggagtgggcgaagtacatcccggccttctgcgagctccccctggacgaccaggtcgccctgctccgggcccacgccggcgagcacctcctgctgggggcgaccaagcgctccatggtgttcaaggacgtgctgctgctcggcaacgactacatcgtcccccggcactgccccgagctggccgagatgagccgcgtgtccatccggatcctggacgagctcgtgctgccgttccaggagctgcagatcgacgacaacgagtacgcctacctcaaggccatcatcttcttcgaccccgacgcccgcggcctgagcgaccccgggaagatcaagcgcctgcgctcccaggtccaggtgagcctcgaggactacatcaacgaccggcagtacgactcccgcggccggttcggggagctgctgctcctgctgcccacgctccagagcatcacctggcagatgatcgagcagatccagttcatcaagctgttcggcatggcgaagatcgacaacctgctccaggagatgctgctgggcgggtccccgagcgacgcgccccacgcccaccaccccctccacccccacctgatgcaggagcacatgggcaccaacgtgatcgtcgccaacaccatgccgacgcacctgtccaacgggcagatgtgcgagtggccccgcccccggggccaggccgccacccccgagaccccgcagcccagcccgcccgggggctccggcagcgagccctacaagctgctccccggggccgtggccaccatcgtgaagcccctgtccgccatcccccagccgacgatcaccaagcaggaggtcatcgcctatccttatgatgttcctgattatgcagcctacccctacgacgtgccggactacgccgcctacccctatgacgtgcctgattacgccgcgtgaggactagtccctgttcccagagcccacttttttttctttttttgaaataaaatagcctgtctttcagatctcaaaggctcttttcagagccaccaaaaaaaaaaaaaaaaaaaaaaaaaaaaaaaaaaaaaaaaaaaaaaaaaaaaaaaaaaaaaaaaaaaaaaaaaaaaaaaaaaaaaaaaaaaaaaaaaaaaa

SEQ ID NO: 5582 - RNA, 1790 nt, synthetic construct
  misc_feature 1..1790: note = mRNA a-1 (hSL-A100) (opt1) from Homo sapiens__NP_000448.3__HNF4A(1-474)(K300R_K307R_K309R)_HA-ta g R9474
  source 1..1790: mol_type = other RNA
aggagagtcccgcagtcggcgtccagcggctctgcttgttcgtgtgtgtgtcgttgcaggccttattcaagcttaccatgcgcctgagcaagaccctcgtggacatggacatggccgactactccgccgcgctggaccccgcctacaccacgctggagttcgagaacgtccaggtgctcaccatgggcaacgacaccagcccgtccgaggggaccaacctgaacgcccccaacagcctgggcgtgtccgccctctgcgccatctgcggggaccgggcgacgggcaagcactacggggccagctcctgcgacggctgcaagggcttcttccgccggagcgtccgcaagaaccacatgtactcctgccggttcagccgccagtgcgtggtggacaaggacaagcggaaccagtgccgctactgccggctgaagaagtgcttccgcgccgggatgaagaaggaggccgtccagaacgagcgggaccgcatctccacccggcgcagctcctacgaggacagctccctgcccagcatcaacgcgctcctgcaggccgaggtgctgtcccggcagatcaccagccccgtgtccggcatcaacggggacatccgcgccaagaagatcgccagcatcgccgacgtctgcgagagcatgaaggagcagctcctggtgctggtggagtgggcgaagtacatcccggccttctgcgagctccccctggacgaccaggtcgccctgctccgggcccacgccggcgagcacctcctgctgggggcgaccaagcgctccatggtgttcaaggacgtgctgctgctcggcaacgactacatcgtcccccggcactgccccgagctggccgagatgagccgcgtgtccatccggatcctggacgagctcgtgctgccgttccaggagctgcagatcgacgacaacgagtacgcctacctcaaggccatcatcttcttcgaccccgacgcccgcggcctgagcgaccccgggcgcatccggcgcctgcgctcccaggtccaggtgagcctcgaggactacatcaacgaccggcagtacgactcccgcggccggttcggggagctgctgctcctgctgcccacgctccagagcatcacctggcagatgatcgagcagatccagttcatcaagctgttcggcatggcgaagatcgacaacctgctccaggagatgctgctgggcgggtccccgagcgacgcgccccacgcccaccaccccctccacccccacctgatgcaggagcacatgggcaccaacgtgatcgtcgccaacaccatgccgacgcacctgtccaacgggcagatgtgcgagtggccccgcccccggggccaggccgccacccccgagaccccgcagcccagcccgcccgggggctccggcagcgagccctacaagctgctccccggggccgtggccaccatcgtgaagcccctgtccgccatcccccagccgacgatcaccaagcaggaggtcatcgcctatccttatgatgttcctgattatgcagcctacccctacgacgtgccggactacgccgcctacccctatgacgtgcctgattacgccgcgtgaggactagtccctgttcccagagcccacttttttttctttttttgaaataaaatagcctgtctttcagatctcaaaggctcttttcagagccaccaaaaaaaaaaaaaaaaaaaaaaaaaaaaaaaaaaaaaaaaaaaaaaaaaaaaaaaaaaaaaaaaaaaaaaaaaaaaaaaaaaaaaaaaaaaaaaaaaaaaa

SEQ ID NO: 5583 - RNA, 1790 nt, synthetic construct
  misc_feature 1..1790: note = mRNA a-1 (hSL-A100) (opt1) from Homo sapiens__NP_000448.3__HNF4A(1-474)(K447R_K470R)_HA-tag R9475
  source 1..1790: mol_type = other RNA
aggagagtcccgcagtcggcgtccagcggctctgcttgttcgtgtgtgtgtcgttgcaggccttattcaagcttaccatgcgcctgagcaagaccctcgtggacatggacatggccgactactccgccgcgctggaccccgcctacaccacgctggagttcgagaacgtccaggtgctcaccatgggcaacgacaccagcccgtccgaggggaccaacctgaacgcccccaacagcctgggcgtgtccgccctctgcgccatctgcggggaccgggcgacgggcaagcactacggggccagctcctgcgacggctgcaagggcttcttccgccggagcgtccgcaagaaccacatgtactcctgccggttcagccgccagtgcgtggtggacaaggacaagcggaaccagtgccgctactgccggctgaagaagtgcttccgcgccgggatgaagaaggaggccgtccagaacgagcgggaccgcatctccacccggcgcagctcctacgaggacagctccctgcccagcatcaacgcgctcctgcaggccgaggtgctgtcccggcagatcaccagccccgtgtccggcatcaacggggacatccgcgccaagaagatcgccagcatcgccgacgtctgcgagagcatgaaggagcagctcctggtgctggtggagtgggcgaagtacatcccggccttctgcgagctccccctggacgaccaggtcgccctgctccgggcccacgccggcgagcacctcctgctgggggcgaccaagcgctccatggtgttcaaggacgtgctgctgctcggcaacgactacatcgtcccccggcactgccccgagctggccgagatgagccgcgtgtccatccggatcctggacgagctcgtgctgccgttccaggagctgcagatcgacgacaacgagtacgcctacctcaaggccatcatcttcttcgaccccgacgccaagggcctgagcgaccccgggaagatcaagcgcctgcgctcccaggtccaggtgagcctcgaggactacatcaacgaccggcagtacgactcccgcggccggttcggggagctgctgctcctgctgcccacgctccagagcatcacctggcagatgatcgagcagatccagttcatcaagctgttcggcatggcgaagatcgacaacctgctccaggagatgctgctgggcgggtccccgagcgacgcgccccacgcccaccaccccctccacccccacctgatgcaggagcacatgggcaccaacgtgatcgtcgccaacaccatgccgacgcacctgtccaacgggcagatgtgcgagtggccccgcccccggggccaggccgccacccccgagaccccgcagcccagcccgcccgggggctccggcagcgagccctaccggctgctccccggggccgtggccaccatcgtgaagcccctgtccgccatcccccagccgacgatcacccggcaggaggtcatcgcctatccttatgatgttcctgattatgcagcctacccctacgacgtgccggactacgccgcctacccctatgacgtgcctgattacgccgcgtgaggactagtccctgttcccagagcccacttttttttctttttttgaaataaaatagcctgtctttcagatctcaaaggctcttttcagagccaccaaaaaaaaaaaaaaaaaaaaaaaaaaaaaaaaaaaaaaaaaaaaaaaaaaaaaaaaaaaaaaaaaaaaaaaaaaaaaaaaaaaaaaaaaaaaaaaaaaaaa

SEQ ID NO: 5584 - RNA, 1790 nt, synthetic construct
  misc_feature 1..1790: note = mRNA a-1 (hSL-A100) (opt1) from Homo sapiens__NP_000448.3__HNF4A(1-474)(K458R)_HA-tag R9476
  source 1..1790: mol_type = other RNA
aggagagtcccgcagtcggcgtccagcggctctgcttgttcgtgtgtgtgtcgttgcaggccttattcaagcttaccatgcgcctgagcaagaccctcgtggacatggacatggccgactactccgccgcgctggaccccgcctacaccacgctggagttcgagaacgtccaggtgctcaccatgggcaacgacaccagcccgtccgaggggaccaacctgaacgcccccaacagcctgggcgtgtccgccctctgcgccatctgcggggaccgggcgacgggcaagcactacggggccagctcctgcgacggctgcaagggcttcttccgccggagcgtccgcaagaaccacatgtactcctgccggttcagccgccagtgcgtggtggacaaggacaagcggaaccagtgccgctactgccggctgaagaagtgcttccgcgccgggatgaagaaggaggccgtccagaacgagcgggaccgcatctccacccggcgcagctcctacgaggacagctccctgcccagcatcaacgcgctcctgcaggccgaggtgctgtcccggcagatcaccagccccgtgtccggcatcaacggggacatccgcgccaagaagatcgccagcatcgccgacgtctgcgagagcatgaaggagcagctcctggtgctggtggagtgggcgaagtacatcccggccttctgcgagctccccctggacgaccaggtcgccctgctccgggcccacgccggcgagcacctcctgctgggggcgaccaagcgctccatggtgttcaaggacgtgctgctgctcggcaacgactacatcgtcccccggcactgccccgagctggccgagatgagccgcgtgtccatccggatcctggacgagctcgtgctgccgttccaggagctgcagatcgacgacaacgagtacgcctacctcaaggccatcatcttcttcgaccccgacgccaagggcctgagcgaccccgggaagatcaagcgcctgcgctcccaggtccaggtgagcctcgaggactacatcaacgaccggcagtacgactcccgcggccggttcggggagctgctgctcctgctgcccacgctccagagcatcacctggcagatgatcgagcagatccagttcatcaagctgttcggcatggcgaagatcgacaacctgctccaggagatgctgctgggcgggtccccgagcgacgcgccccacgcccaccaccccctccacccccacctgatgcaggagcacatgggcaccaacgtgatcgtcgccaacaccatgccgacgcacctgtccaacgggcagatgtgcgagtggccccgcccccggggccaggccgccacccccgagaccccgcagcccagcccgcccgggggctccggcagcgagccctacaagctgctccccggggccgtggccaccatcgtgcggcccctgtccgccatcccccagccgacgatcaccaagcaggaggtcatcgcctatccttatgatgttcctgattatgcagcctacccctacgacgtgccggactacgccgcctacccctatgacgtgcctgattacgccgcgtgaggactagtccctgttcccagagcccacttttttttctttttttgaaataaaatagcctgtctttcagatctcaaaggctcttttcagagccaccaaaaaaaaaaaaaaaaaaaaaaaaaaaaaaaaaaaaaaaaaaaaaaaaaaaaaaaaaaaaaaaaaaaaaaaaaaaaaaaaaaaaaaaaaaaaaaaaaaaaa

SEQ ID NO: 5585 - RNA, 1790 nt, synthetic construct
  misc_feature 1..1790: note = mRNA a-1 (hSL-A100) (opt1) from Homo sapiens__NP_000448.3__HNF4A(1-474)(K106R_K108R_K126R_K127R) _HA-tag R9477
  source 1..1790: mol_type = other RNA
aggagagtcccgcagtcggcgtccagcggctctgcttgttcgtgtgtgtgtcgttgcaggccttattcaagcttaccatgcgcctgagcaagaccctcgtggacatggacatggccgactactccgccgcgctggaccccgcctacaccacgctggagttcgagaacgtccaggtgctcaccatgggcaacgacaccagcccgtccgaggggaccaacctgaacgcccccaacagcctgggcgtgtccgccctctgcgccatctgcggggaccgggcgacgggcaagcactacggggccagctcctgcgacggctgcaagggcttcttccgccggagcgtccgcaagaaccacatgtactcctgccggttcagccgccagtgcgtggtggaccgcgaccggcggaaccagtgccgctactgccggctgaagaagtgcttccgcgccgggatgcgccgcgaggccgtccagaacgagcgggaccgcatctccacccggcgcagctcctacgaggacagctccctgcccagcatcaacgcgctcctgcaggccgaggtgctgtcccggcagatcaccagccccgtgtccggcatcaacggggacatccgcgccaagaagatcgccagcatcgccgacgtctgcgagagcatgaaggagcagctcctggtgctggtggagtgggcgaagtacatcccggccttctgcgagctccccctggacgaccaggtcgccctgctccgggcccacgccggcgagcacctcctgctgggggcgaccaagcgctccatggtgttcaaggacgtgctgctgctcggcaacgactacatcgtcccccggcactgccccgagctggccgagatgagccgcgtgtccatccggatcctggacgagctcgtgctgccgttccaggagctgcagatcgacgacaacgagtacgcctacctcaaggccatcatcttcttcgaccccgacgccaagggcctgagcgaccccgggaagatcaagcgcctgcgctcccaggtccaggtgagcctcgaggactacatcaacgaccggcagtacgactcccgcggccggttcggggagctgctgctcctgctgcccacgctccagagcatcacctggcagatgatcgagcagatccagttcatcaagctgttcggcatggcgaagatcgacaacctgctccaggagatgctgctgggcgggtccccgagcgacgcgccccacgcccaccaccccctccacccccacctgatgcaggagcacatgggcaccaacgtgatcgtcgccaacaccatgccgacgcacctgtccaacgggcagatgtgcgagtggccccgcccccggggccaggccgccacccccgagaccccgcagcccagcccgcccgggggctccggcagcgagccctacaagctgctccccggggccgtggccaccatcgtgaagcccctgtccgccatcccccagccgacgatcaccaagcaggaggtcatcgcctatccttatgatgttcctgattatgcagcctacccctacgacgtgccggactacgccgcctacccctatgacgtgcctgattacgccgcgtgaggactagtccctgttcccagagcccacttttttttctttttttgaaataaaatagcctgtctttcagatctcaaaggctcttttcagagccaccaaaaaaaaaaaaaaaaaaaaaaaaaaaaaaaaaaaaaaaaaaaaaaaaaaaaaaaaaaaaaaaaaaaaaaaaaaaaaaaaaaaaaaaaaaaaaaaaaaaaa

SEQ ID NO: 5586 - RNA, 1790 nt, synthetic construct
  misc_feature 1..1790: note = mRNA a-1 (hSL-A100) (opt1) from Homo sapiens__NP_000448.3__HNF4A(1-474)(E285Q)_HA-tag R9480
  source 1..1790: mol_type = other RNA
aggagagtcccgcagtcggcgtccagcggctctgcttgttcgtgtgtgtgtcgttgcaggccttattcaagcttaccatgcgcctgagcaagaccctcgtggacatggacatggccgactactccgccgcgctggaccccgcctacaccacgctggagttcgagaacgtccaggtgctcaccatgggcaacgacaccagcccgtccgaggggaccaacctgaacgcccccaacagcctgggcgtgtccgccctctgcgccatctgcggggaccgggcgacgggcaagcactacggggccagctcctgcgacggctgcaagggcttcttccgccggagcgtccgcaagaaccacatgtactcctgccggttcagccgccagtgcgtggtggacaaggacaagcggaaccagtgccgctactgccggctgaagaagtgcttccgcgccgggatgaagaaggaggccgtccagaacgagcgggaccgcatctccacccggcgcagctcctacgaggacagctccctgcccagcatcaacgcgctcctgcaggccgaggtgctgtcccggcagatcaccagccccgtgtccggcatcaacggggacatccgcgccaagaagatcgccagcatcgccgacgtctgcgagagcatgaaggagcagctcctggtgctggtggagtgggcgaagtacatcccggccttctgcgagctccccctggacgaccaggtcgccctgctccgggcccacgccggcgagcacctcctgctgggggcgaccaagcgctccatggtgttcaaggacgtgctgctgctcggcaacgactacatcgtcccccggcactgccccgagctggccgagatgagccgcgtgtccatccggatcctggacgagctcgtgctgccgttccaggagctgcagatcgacgacaaccagtacgcctacctcaaggccatcatcttcttcgaccccgacgccaagggcctgagcgaccccgggaagatcaagcgcctgcgctcccaggtccaggtgagcctcgaggactacatcaacgaccggcagtacgactcccgcggccggttcggggagctgctgctcctgctgcccacgctccagagcatcacctggcagatgatcgagcagatccagttcatcaagctgttcggcatggcgaagatcgacaacctgctccaggagatgctgctgggcgggtccccgagcgacgcgccccacgcccaccaccccctccacccccacctgatgcaggagcacatgggcaccaacgtgatcgtcgccaacaccatgccgacgcacctgtccaacgggcagatgtgcgagtggccccgcccccggggccaggccgccacccccgagaccccgcagcccagcccgcccgggggctccggcagcgagccctacaagctgctccccggggccgtggccaccatcgtgaagcccctgtccgccatcccccagccgacgatcaccaagcaggaggtcatcgcctatccttatgatgttcctgattatgcagcctacccctacgacgtgccggactacgccgcctacccctatgacgtgcctgattacgccgcgtgaggactagtccctgttcccagagcccacttttttttctttttttgaaataaaatagcctgtctttcagatctcaaaggctcttttcagagccaccaaaaaaaaaaaaaaaaaaaaaaaaaaaaaaaaaaaaaaaaaaaaaaaaaaaaaaaaaaaaaaaaaaaaaaaaaaaaaaaaaaaaaaaaaaaaaaaaaaaaa

SEQ ID NO: 5587 - RNA, 1790 nt, synthetic construct
  misc_feature 1..1790: note = mRNA a-1 (hSL-A100) (opt1) from Homo sapiens__NP_000448.3__HNF4A(1-474)(T166E)_HA-tag R9481
  source 1..1790: mol_type = other RNA
aggagagtcccgcagtcggcgtccagcggctctgcttgttcgtgtgtgtgtcgttgcaggccttattcaagcttaccatgcgcctgagcaagaccctcgtggacatggacatggccgactactccgccgcgctggaccccgcctacaccacgctggagttcgagaacgtccaggtgctcaccatgggcaacgacaccagcccgtccgaggggaccaacctgaacgcccccaacagcctgggcgtgtccgccctctgcgccatctgcggggaccgggcgacgggcaagcactacggggccagctcctgcgacggctgcaagggcttcttccgccggagcgtccgcaagaaccacatgtactcctgccggttcagccgccagtgcgtggtggacaaggacaagcggaaccagtgccgctactgccggctgaagaagtgcttccgcgccgggatgaagaaggaggccgtccagaacgagcgggaccgcatctccacccggcgcagctcctacgaggacagctccctgcccagcatcaacgcgctcctgcaggccgaggtgctgtcccggcagatcgagagccccgtgtccggcatcaacggggacatccgcgccaagaagatcgccagcatcgccgacgtctgcgagagcatgaaggagcagctcctggtgctggtggagtgggcgaagtacatcccggccttctgcgagctccccctggacgaccaggtcgccctgctccgggcccacgccggcgagcacctcctgctgggggcgaccaagcgctccatggtgttcaaggacgtgctgctgctcggcaacgactacatcgtcccccggcactgccccgagctggccgagatgagccgcgtgtccatccggatcctggacgagctcgtgctgccgttccaggagctgcagatcgacgacaacgagtacgcctacctcaaggccatcatcttcttcgaccccgacgccaagggcctgagcgaccccgggaagatcaagcgcctgcgctcccaggtccaggtgagcctcgaggactacatcaacgaccggcagtacgactcccgcggccggttcggggagctgctgctcctgctgcccacgctccagagcatcacctggcagatgatcgagcagatccagttcatcaagctgttcggcatggcgaagatcgacaacctgctccaggagatgctgctgggcgggtccccgagcgacgcgccccacgcccaccaccccctccacccccacctgatgcaggagcacatgggcaccaacgtgatcgtcgccaacaccatgccgacgcacctgtccaacgggcagatgtgcgagtggccccgcccccggggccaggccgccacccccgagaccccgcagcccagcccgcccgggggctccggcagcgagccctacaagctgctccccggggccgtggccaccatcgtgaagcccctgtccgccatcccccagccgacgatcaccaagcaggaggtcatcgcctatccttatgatgttcctgattatgcagcctacccctacgacgtgccggactacgccgcctacccctatgacgtgcctgattacgccgcgtgaggactagtccctgttcccagagcccacttttttttctttttttgaaataaaatagcctgtctttcagatctcaaaggctcttttcagagccaccaaaaaaaaaaaaaaaaaaaaaaaaaaaaaaaaaaaaaaaaaaaaaaaaaaaaaaaaaaaaaaaaaaaaaaaaaaaaaaaaaaaaaaaaaaaaaaaaaaaaa

SEQ ID NO: 5588 - RNA, 1790 nt, synthetic construct
  misc_feature 1..1790: note = mRNA a-1 (hSL-A100) (opt1) from Homo sapiens__NP_000448.3__HNF4A(1-474)(S148A)_HA-tag R9532
  source 1..1790: mol_type = other RNA
aggagagtcccgcagtcggcgtccagcggctctgcttgttcgtgtgtgtgtcgttgcaggccttattcaagcttaccatgcgcctgagcaagaccctcgtggacatggacatggccgactactccgccgcgctggaccccgcctacaccacgctggagttcgagaacgtccaggtgctcaccatgggcaacgacaccagcccgtccgaggggaccaacctgaacgcccccaacagcctgggcgtgtccgccctctgcgccatctgcggggaccgggcgacgggcaagcactacggggccagctcctgcgacggctgcaagggcttcttccgccggagcgtccgcaagaaccacatgtactcctgccggttcagccgccagtgcgtggtggacaaggacaagcggaaccagtgccgctactgccggctgaagaagtgcttccgcgccgggatgaagaaggaggccgtccagaacgagcgggaccgcatctccacccggcgcagctcctacgaggacagcgcgctgcccagcatcaacgcgctcctgcaggccgaggtgctgtcccggcagatcaccagccccgtgtccggcatcaacggggacatccgcgccaagaagatcgccagcatcgccgacgtctgcgagagcatgaaggagcagctcctggtgctggtggagtgggcgaagtacatcccggccttctgcgagctccccctggacgaccaggtcgccctgctccgggcccacgccggcgagcacctcctgctgggggcgaccaagcgctccatggtgttcaaggacgtgctgctgctcggcaacgactacatcgtcccccggcactgccccgagctggccgagatgagccgcgtgtccatccggatcctggacgagctcgtgctgccgttccaggagctgcagatcgacgacaacgagtacgcctacctcaaggccatcatcttcttcgaccccgacgccaagggcctgagcgaccccgggaagatcaagcgcctgcgctcccaggtccaggtgagcctcgaggactacatcaacgaccggcagtacgactcccgcggccggttcggggagctgctgctcctgctgcccacgctccagagcatcacctggcagatgatcgagcagatccagttcatcaagctgttcggcatggcgaagatcgacaacctgctccaggagatgctgctgggcgggtccccgagcgacgcgccccacgcccaccaccccctccacccccacctgatgcaggagcacatgggcaccaacgtgatcgtcgccaacaccatgccgacgcacctgtccaacgggcagatgtgcgagtggccccgcccccggggccaggccgccacccccgagaccccgcagcccagcccgcccgggggctccggcagcgagccctacaagctgctccccggggccgtggccaccatcgtgaagcccctgtccgccatcccccagccgacgatcaccaagcaggaggtcatcgcctatccttatgatgttcctgattatgcagcctacccctacgacgtgccggactacgccgcctacccctatgacgtgcctgattacgccgcgtgaggactagtccctgttcccagagcccacttttttttctttttttgaaataaaatagcctgtctttcagatctcaaaggctcttttcagagccaccaaaaaaaaaaaaaaaaaaaaaaaaaaaaaaaaaaaaaaaaaaaaaaaaaaaaaaaaaaaaaaaaaaaaaaaaaaaaaaaaaaaaaaaaaaaaaaaaaaaaa

SEQ ID NO: 5589 - RNA, 1790 nt, synthetic construct
  misc_feature 1..1790: note = mRNA a-1 (hSL-A100) (opt1) from Homo sapiens__NP_000448.3__HNF4A(1-474)(S148E)_HA-tag R9533
  source 1..1790: mol_type = other RNA
aggagagtcccgcagtcggcgtccagcggctctgcttgttcgtgtgtgtgtcgttgcaggccttattcaagcttaccatgcgcctgagcaagaccctcgtggacatggacatggccgactactccgccgcgctggaccccgcctacaccacgctggagttcgagaacgtccaggtgctcaccatgggcaacgacaccagcccgtccgaggggaccaacctgaacgcccccaacagcctgggcgtgtccgccctctgcgccatctgcggggaccgggcgacgggcaagcactacggggccagctcctgcgacggctgcaagggcttcttccgccggagcgtccgcaagaaccacatgtactcctgccggttcagccgccagtgcgtggtggacaaggacaagcggaaccagtgccgctactgccggctgaagaagtgcttccgcgccgggatgaagaaggaggccgtccagaacgagcgggaccgcatctccacccggcgcagctcctacgaggacagcgagctgcccagcatcaacgcgctcctgcaggccgaggtgctgtcccggcagatcaccagccccgtgtccggcatcaacggggacatccgcgccaagaagatcgccagcatcgccgacgtctgcgagagcatgaaggagcagctcctggtgctggtggagtgggcgaagtacatcccggccttctgcgagctccccctggacgaccaggtcgccctgctccgggcccacgccggcgagcacctcctgctgggggcgaccaagcgctccatggtgttcaaggacgtgctgctgctcggcaacgactacatcgtcccccggcactgccccgagctggccgagatgagccgcgtgtccatccggatcctggacgagctcgtgctgccgttccaggagctgcagatcgacgacaacgagtacgcctacctcaaggccatcatcttcttcgaccccgacgccaagggcctgagcgaccccgggaagatcaagcgcctgcgctcccaggtccaggtgagcctcgaggactacatcaacgaccggcagtacgactcccgcggccggttcggggagctgctgctcctgctgcccacgctccagagcatcacctggcagatgatcgagcagatccagttcatcaagctgttcggcatggcgaagatcgacaacctgctccaggagatgctgctgggcgggtccccgagcgacgcgccccacgcccaccaccccctccacccccacctgatgcaggagcacatgggcaccaacgtgatcgtcgccaacaccatgccgacgcacctgtccaacgggcagatgtgcgagtggccccgcccccggggccaggccgccacccccgagaccccgcagcccagcccgcccgggggctccggcagcgagccctacaagctgctccccggggccgtggccaccatcgtgaagcccctgtccgccatcccccagccgacgatcaccaagcaggaggtcatcgcctatccttatgatgttcctgattatgcagcctacccctacgacgtgccggactacgccgcctacccctatgacgtgcctgattacgccgcgtgaggactagtccctgttcccagagcccacttttttttctttttttgaaataaaatagcctgtctttcagatctcaaaggctcttttcagagccaccaaaaaaaaaaaaaaaaaaaaaaaaaaaaaaaaaaaaaaaaaaaaaaaaaaaaaaaaaaaaaaaaaaaaaaaaaaaaaaaaaaaaaaaaaaaaaaaaaaaaa

SEQ ID NO: 5590 - RNA, 1790 nt, synthetic construct
  misc_feature 1..1790: note = mRNA a-1 (hSL-A100) (opt1) from Homo sapiens__NP_000448.3__HNF4A(1-474)(S183A)_HA-tag R9534
  source 1..1790: mol_type = other RNA
aggagagtcccgcagtcggcgtccagcggctctgcttgttcgtgtgtgtgtcgttgcaggccttattcaagcttaccatgcgcctgagcaagaccctcgtggacatggacatggccgactactccgccgcgctggaccccgcctacaccacgctggagttcgagaacgtccaggtgctcaccatgggcaacgacaccagcccgtccgaggggaccaacctgaacgcccccaacagcctgggcgtgtccgccctctgcgccatctgcggggaccgggcgacgggcaagcactacggggccagctcctgcgacggctgcaagggcttcttccgccggagcgtccgcaagaaccacatgtactcctgccggttcagccgccagtgcgtggtggacaaggacaagcggaaccagtgccgctactgccggctgaagaagtgcttccgcgccgggatgaagaaggaggccgtccagaacgagcgggaccgcatctccacccggcgcagctcctacgaggacagctccctgcccagcatcaacgcgctcctgcaggccgaggtgctgtcccggcagatcaccagccccgtgtccggcatcaacggggacatccgcgccaagaagatcgccgcgatcgccgacgtctgcgagagcatgaaggagcagctcctggtgctggtggagtgggcgaagtacatcccggccttctgcgagctccccctggacgaccaggtcgccctgctccgggcccacgccggcgagcacctcctgctgggggcgaccaagcgctccatggtgttcaaggacgtgctgctgctcggcaacgactacatcgtcccccggcactgccccgagctggccgagatgagccgcgtgtccatccggatcctggacgagctcgtgctgccgttccaggagctgcagatcgacgacaacgagtacgcctacctcaaggccatcatcttcttcgaccccgacgccaagggcctgagcgaccccgggaagatcaagcgcctgcgctcccaggtccaggtgagcctcgaggactacatcaacgaccggcagtacgactcccgcggccggttcggggagctgctgctcctgctgcccacgctccagagcatcacctggcagatgatcgagcagatccagttcatcaagctgttcggcatggcgaagatcgacaacctgctccaggagatgctgctgggcgggtccccgagcgacgcgccccacgcccaccaccccctccacccccacctgatgcaggagcacatgggcaccaacgtgatcgtcgccaacaccatgccgacgcacctgtccaacgggcagatgtgcgagtggccccgcccccggggccaggccgccacccccgagaccccgcagcccagcccgcccgggggctccggcagcgagccctacaagctgctccccggggccgtggccaccatcgtgaagcccctgtccgccatcccccagccgacgatcaccaagcaggaggtcatcgcctatccttatgatgttcctgattatgcagcctacccctacgacgtgccggactacgccgcctacccctatgacgtgcctgattacgccgcgtgaggactagtccctgttcccagagcccacttttttttctttttttgaaataaaatagcctgtctttcagatctcaaaggctcttttcagagccaccaaaaaaaaaaaaaaaaaaaaaaaaaaaaaaaaaaaaaaaaaaaaaaaaaaaaaaaaaaaaaaaaaaaaaaaaaaaaaaaaaaaaaaaaaaaaaaaaaaaaa

SEQ ID NO: 5591 - RNA, 1790 nt, synthetic construct
  misc_feature 1..1790: note = mRNA a-1 (hSL-A100) (opt1) from Homo sapiens__NP_000448.3__HNF4A(1-474)(S183E)_HA-tag R9535
  source 1..1790: mol_type = other RNA
aggagagtcccgcagtcggcgtccagcggctctgcttgttcgtgtgtgtgtcgttgcaggccttattcaagcttaccatgcgcctgagcaagaccctcgtggacatggacatggccgactactccgccgcgctggaccccgcctacaccacgctggagttcgagaacgtccaggtgctcaccatgggcaacgacaccagcccgtccgaggggaccaacctgaacgcccccaacagcctgggcgtgtccgccctctgcgccatctgcggggaccgggcgacgggcaagcactacggggccagctcctgcgacggctgcaagggcttcttccgccggagcgtccgcaagaaccacatgtactcctgccggttcagccgccagtgcgtggtggacaaggacaagcggaaccagtgccgctactgccggctgaagaagtgcttccgcgccgggatgaagaaggaggccgtccagaacgagcgggaccgcatctccacccggcgcagctcctacgaggacagctccctgcccagcatcaacgcgctcctgcaggccgaggtgctgtcccggcagatcaccagccccgtgtccggcatcaacggggacatccgcgccaagaagatcgccgagatcgccgacgtctgcgagagcatgaaggagcagctcctggtgctggtggagtgggcgaagtacatcccggccttctgcgagctccccctggacgaccaggtcgccctgctccgggcccacgccggcgagcacctcctgctgggggcgaccaagcgctccatggtgttcaaggacgtgctgctgctcggcaacgactacatcgtcccccggcactgccccgagctggccgagatgagccgcgtgtccatccggatcctggacgagctcgtgctgccgttccaggagctgcagatcgacgacaacgagtacgcctacctcaaggccatcatcttcttcgaccccgacgccaagggcctgagcgaccccgggaagatcaagcgcctgcgctcccaggtccaggtgagcctcgaggactacatcaacgaccggcagtacgactcccgcggccggttcggggagctgctgctcctgctgcccacgctccagagcatcacctggcagatgatcgagcagatccagttcatcaagctgttcggcatggcgaagatcgacaacctgctccaggagatgctgctgggcgggtccccgagcgacgcgccccacgcccaccaccccctccacccccacctgatgcaggagcacatgggcaccaacgtgatcgtcgccaacaccatgccgacgcacctgtccaacgggcagatgtgcgagtggccccgcccccggggccaggccgccacccccgagaccccgcagcccagcccgcccgggggctccggcagcgagccctacaagctgctccccggggccgtggccaccatcgtgaagcccctgtccgccatcccccagccgacgatcaccaagcaggaggtcatcgcctatccttatgatgttcctgattatgcagcctacccctacgacgtgccggactacgccgcctacccctatgacgtgcctgattacgccgcgtgaggactagtccctgttcccagagcccacttttttttctttttttgaaataaaatagcctgtctttcagatctcaaaggctcttttcagagccaccaaaaaaaaaaaaaaaaaaaaaaaaaaaaaaaaaaaaaaaaaaaaaaaaaaaaaaaaaaaaaaaaaaaaaaaaaaaaaaaaaaaaaaaaaaaaaaaaaaaaa

SEQ ID NO: 5592 - RNA, 1790 nt, synthetic construct
  misc_feature 1..1790: note = mRNA a-1 (hSL-A100) (opt1) from Homo sapiens__NP_000448.3__HNF4A(1-474)(S461A)_HA-tag R9536
  source 1..1790: mol_type = other RNA
aggagagtcccgcagtcggcgtccagcggctctgcttgttcgtgtgtgtgtcgttgcaggccttattcaagcttaccatgcgcctgagcaagaccctcgtggacatggacatggccgactactccgccgcgctggaccccgcctacaccacgctggagttcgagaacgtccaggtgctcaccatgggcaacgacaccagcccgtccgaggggaccaacctgaacgcccccaacagcctgggcgtgtccgccctctgcgccatctgcggggaccgggcgacgggcaagcactacggggccagctcctgcgacggctgcaagggcttcttccgccggagcgtccgcaagaaccacatgtactcctgccggttcagccgccagtgcgtggtggacaaggacaagcggaaccagtgccgctactgccggctgaagaagtgcttccgcgccgggatgaagaaggaggccgtccagaacgagcgggaccgcatctccacccggcgcagctcctacgaggacagctccctgcccagcatcaacgcgctcctgcaggccgaggtgctgtcccggcagatcaccagccccgtgtccggcatcaacggggacatccgcgccaagaagatcgccagcatcgccgacgtctgcgagagcatgaaggagcagctcctggtgctggtggagtgggcgaagtacatcccggccttctgcgagctccccctggacgaccaggtcgccctgctccgggcccacgccggcgagcacctcctgctgggggcgaccaagcgctccatggtgttcaaggacgtgctgctgctcggcaacgactacatcgtcccccggcactgccccgagctggccgagatgagccgcgtgtccatccggatcctggacgagctcgtgctgccgttccaggagctgcagatcgacgacaacgagtacgcctacctcaaggccatcatcttcttcgaccccgacgccaagggcctgagcgaccccgggaagatcaagcgcctgcgctcccaggtccaggtgagcctcgaggactacatcaacgaccggcagtacgactcccgcggccggttcggggagctgctgctcctgctgcccacgctccagagcatcacctggcagatgatcgagcagatccagttcatcaagctgttcggcatggcgaagatcgacaacctgctccaggagatgctgctgggcgggtccccgagcgacgcgccccacgcccaccaccccctccacccccacctgatgcaggagcacatgggcaccaacgtgatcgtcgccaacaccatgccgacgcacctgtccaacgggcagatgtgcgagtggccccgcccccggggccaggccgccacccccgagaccccgcagcccagcccgcccgggggctccggcagcgagccctacaagctgctccccggggccgtggccaccatcgtgaagcccctggcggccatcccccagccgacgatcaccaagcaggaggtcatcgcctatccttatgatgttcctgattatgcagcctacccctacgacgtgccggactacgccgcctacccctatgacgtgcctgattacgccgcgtgaggactagtccctgttcccagagcccacttttttttctttttttgaaataaaatagcctgtctttcagatctcaaaggctcttttcagagccaccaaaaaaaaaaaaaaaaaaaaaaaaaaaaaaaaaaaaaaaaaaaaaaaaaaaaaaaaaaaaaaaaaaaaaaaaaaaaaaaaaaaaaaaaaaaaaaaaaaaaa

SEQ ID NO: 5593 - RNA, 1790 nt, synthetic construct
  misc_feature 1..1790: note = mRNA a-1 (hSL-A100) (opt1) from Homo sapiens__NP_000448.3__HNF4A(1-474)(S461E)_HA-tag R9537
  source 1..1790: mol_type = other RNA
aggagagtcccgcagtcggcgtccagcggctctgcttgttcgtgtgtgtgtcgttgcaggccttattcaagcttaccatgcgcctgagcaagaccctcgtggacatggacatggccgactactccgccgcgctggaccccgcctacaccacgctggagttcgagaacgtccaggtgctcaccatgggcaacgacaccagcccgtccgaggggaccaacctgaacgcccccaacagcctgggcgtgtccgccctctgcgccatctgcggggaccgggcgacgggcaagcactacggggccagctcctgcgacggctgcaagggcttcttccgccggagcgtccgcaagaaccacatgtactcctgccggttcagccgccagtgcgtggtggacaaggacaagcggaaccagtgccgctactgccggctgaagaagtgcttccgcgccgggatgaagaaggaggccgtccagaacgagcgggaccgcatctccacccggcgcagctcctacgaggacagctccctgcccagcatcaacgcgctcctgcaggccgaggtgctgtcccggcagatcaccagccccgtgtccggcatcaacggggacatccgcgccaagaagatcgccagcatcgccgacgtctgcgagagcatgaaggagcagctcctggtgctggtggagtgggcgaagtacatcccggccttctgcgagctccccctggacgaccaggtcgccctgctccgggcccacgccggcgagcacctcctgctgggggcgaccaagcgctccatggtgttcaaggacgtgctgctgctcggcaacgactacatcgtcccccggcactgccccgagctggccgagatgagccgcgtgtccatccggatcctggacgagctcgtgctgccgttccaggagctgcagatcgacgacaacgagtacgcctacctcaaggccatcatcttcttcgaccccgacgccaagggcctgagcgaccccgggaagatcaagcgcctgcgctcccaggtccaggtgagcctcgaggactacatcaacgaccggcagtacgactcccgcggccggttcggggagctgctgctcctgctgcccacgctccagagcatcacctggcagatgatcgagcagatccagttcatcaagctgttcggcatggcgaagatcgacaacctgctccaggagatgctgctgggcgggtccccgagcgacgcgccccacgcccaccaccccctccacccccacctgatgcaggagcacatgggcaccaacgtgatcgtcgccaacaccatgccgacgcacctgtccaacgggcagatgtgcgagtggccccgcccccggggccaggccgccacccccgagaccccgcagcccagcccgcccgggggctccggcagcgagccctacaagctgctccccggggccgtggccaccatcgtgaagcccctggaggccatcccccagccgacgatcaccaagcaggaggtcatcgcctatccttatgatgttcctgattatgcagcctacccctacgacgtgccggactacgccgcctacccctatgacgtgcctgattacgccgcgtgaggactagtccctgttcccagagcccacttttttttctttttttgaaataaaatagcctgtctttcagatctcaaaggctcttttcagagccaccaaaaaaaaaaaaaaaaaaaaaaaaaaaaaaaaaaaaaaaaaaaaaaaaaaaaaaaaaaaaaaaaaaaaaaaaaaaaaaaaaaaaaaaaaaaaaaaaaaaaa

SEQ ID NO: 5594 - RNA, 1790 nt, synthetic construct
  misc_feature 1..1790: note = mRNA a-1 (hSL-A100) (opt1) from Homo sapiens__NP_000448.3__HNF4A(1-474)(S142A_S143A_S313A)_HA-ta g R9849
  source 1..1790: mol_type = other RNA
aggagagtcccgcagtcggcgtccagcggctctgcttgttcgtgtgtgtgtcgttgcaggccttattcaagcttaccatgcgcctgagcaagaccctcgtggacatggacatggccgactactccgccgcgctggaccccgcctacaccacgctggagttcgagaacgtccaggtgctcaccatgggcaacgacaccagcccgtccgaggggaccaacctgaacgcccccaacagcctgggcgtgtccgccctctgcgccatctgcggggaccgggcgacgggcaagcactacggggccagctcctgcgacggctgcaagggcttcttccgccggagcgtccgcaagaaccacatgtactcctgccggttcagccgccagtgcgtggtggacaaggacaagcggaaccagtgccgctactgccggctgaagaagtgcttccgcgccgggatgaagaaggaggccgtccagaacgagcgggaccgcatctccacccggcgcgcggcctacgaggacagctccctgcccagcatcaacgcgctcctgcaggccgaggtgctgtcccggcagatcaccagccccgtgtccggcatcaacggggacatccgcgccaagaagatcgccagcatcgccgacgtctgcgagagcatgaaggagcagctcctggtgctggtggagtgggcgaagtacatcccggccttctgcgagctccccctggacgaccaggtcgccctgctccgggcccacgccggcgagcacctcctgctgggggcgaccaagcgctccatggtgttcaaggacgtgctgctgctcggcaacgactacatcgtcccccggcactgccccgagctggccgagatgagccgcgtgtccatccggatcctggacgagctcgtgctgccgttccaggagctgcagatcgacgacaacgagtacgcctacctcaaggccatcatcttcttcgaccccgacgccaagggcctgagcgaccccgggaagatcaagcgcctgcgcgcgcaggtccaggtgagcctcgaggactacatcaacgaccggcagtacgactcccgcggccggttcggggagctgctgctcctgctgcccacgctccagagcatcacctggcagatgatcgagcagatccagttcatcaagctgttcggcatggcgaagatcgacaacctgctccaggagatgctgctgggcgggtccccgagcgacgcgccccacgcccaccaccccctccacccccacctgatgcaggagcacatgggcaccaacgtgatcgtcgccaacaccatgccgacgcacctgtccaacgggcagatgtgcgagtggccccgcccccggggccaggccgccacccccgagaccccgcagcccagcccgcccgggggctccggcagcgagccctacaagctgctccccggggccgtggccaccatcgtgaagcccctgtccgccatcccccagccgacgatcaccaagcaggaggtcatcgcctatccttatgatgttcctgattatgcagcctacccctacgacgtgccggactacgccgcctacccctatgacgtgcctgattacgccgcgtgaggactagtccctgttcccagagcccacttttttttctttttttgaaataaaatagcctgtctttcagatctcaaaggctcttttcagagccaccaaaaaaaaaaaaaaaaaaaaaaaaaaaaaaaaaaaaaaaaaaaaaaaaaaaaaaaaaaaaaaaaaaaaaaaaaaaaaaaaaaaaaaaaaaaaaaaaaaaaa

SEQ ID NO: 5595 - RNA, 1790 nt, synthetic construct
  misc_feature 1..1790: note = mRNA a-1 (hSL-A100) (opt1) from Homo sapiens__NP_000448.3__HNF4A(1-474)(S142A_S143A_S313A_K458R) _HA-tag R9850
  source 1..1790: mol_type = other RNA
aggagagtcccgcagtcggcgtccagcggctctgcttgttcgtgtgtgtgtcgttgcaggccttattcaagcttaccatgcgcctgagcaagaccctcgtggacatggacatggccgactactccgccgcgctggaccccgcctacaccacgctggagttcgagaacgtccaggtgctcaccatgggcaacgacaccagcccgtccgaggggaccaacctgaacgcccccaacagcctgggcgtgtccgccctctgcgccatctgcggggaccgggcgacgggcaagcactacggggccagctcctgcgacggctgcaagggcttcttccgccggagcgtccgcaagaaccacatgtactcctgccggttcagccgccagtgcgtggtggacaaggacaagcggaaccagtgccgctactgccggctgaagaagtgcttccgcgccgggatgaagaaggaggccgtccagaacgagcgggaccgcatctccacccggcgcgcggcctacgaggacagctccctgcccagcatcaacgcgctcctgcaggccgaggtgctgtcccggcagatcaccagccccgtgtccggcatcaacggggacatccgcgccaagaagatcgccagcatcgccgacgtctgcgagagcatgaaggagcagctcctggtgctggtggagtgggcgaagtacatcccggccttctgcgagctccccctggacgaccaggtcgccctgctccgggcccacgccggcgagcacctcctgctgggggcgaccaagcgctccatggtgttcaaggacgtgctgctgctcggcaacgactacatcgtcccccggcactgccccgagctggccgagatgagccgcgtgtccatccggatcctggacgagctcgtgctgccgttccaggagctgcagatcgacgacaacgagtacgcctacctcaaggccatcatcttcttcgaccccgacgccaagggcctgagcgaccccgggaagatcaagcgcctgcgcgcgcaggtccaggtgagcctcgaggactacatcaacgaccggcagtacgactcccgcggccggttcggggagctgctgctcctgctgcccacgctccagagcatcacctggcagatgatcgagcagatccagttcatcaagctgttcggcatggcgaagatcgacaacctgctccaggagatgctgctgggcgggtccccgagcgacgcgccccacgcccaccaccccctccacccccacctgatgcaggagcacatgggcaccaacgtgatcgtcgccaacaccatgccgacgcacctgtccaacgggcagatgtgcgagtggccccgcccccggggccaggccgccacccccgagaccccgcagcccagcccgcccgggggctccggcagcgagccctacaagctgctccccggggccgtggccaccatcgtgcggcccctgtccgccatcccccagccgacgatcaccaagcaggaggtcatcgcctatccttatgatgttcctgattatgcagcctacccctacgacgtgccggactacgccgcctacccctatgacgtgcctgattacgccgcgtgaggactagtccctgttcccagagcccacttttttttctttttttgaaataaaatagcctgtctttcagatctcaaaggctcttttcagagccaccaaaaaaaaaaaaaaaaaaaaaaaaaaaaaaaaaaaaaaaaaaaaaaaaaaaaaaaaaaaaaaaaaaaaaaaaaaaaaaaaaaaaaaaaaaaaaaaaaaaaa

SEQ ID NO: 5596 - RNA, 1790 nt, synthetic construct
  misc_feature 1..1790: note = mRNA a-1 (hSL-A100) (opt1) from Homo sapiens__NP_000448.3__HNF4A(1-474)(S142A_S143A_S167A_S313A_ S378A_T429A_T432A_S436A_K458R)_HA-tag R9851
  source 1..1790: mol_type = other RNA
aggagagtcccgcagtcggcgtccagcggctctgcttgttcgtgtgtgtgtcgttgcaggccttattcaagcttaccatgcgcctgagcaagaccctcgtggacatggacatggccgactactccgccgcgctggaccccgcctacaccacgctggagttcgagaacgtccaggtgctcaccatgggcaacgacaccagcccgtccgaggggaccaacctgaacgcccccaacagcctgggcgtgtccgccctctgcgccatctgcggggaccgggcgacgggcaagcactacggggccagctcctgcgacggctgcaagggcttcttccgccggagcgtccgcaagaaccacatgtactcctgccggttcagccgccagtgcgtggtggacaaggacaagcggaaccagtgccgctactgccggctgaagaagtgcttccgcgccgggatgaagaaggaggccgtccagaacgagcgggaccgcatctccacccggcgcgcggcctacgaggacagctccctgcccagcatcaacgcgctcctgcaggccgaggtgctgtcccggcagatcaccgcgcccgtgtccggcatcaacggggacatccgcgccaagaagatcgccagcatcgccgacgtctgcgagagcatgaaggagcagctcctggtgctggtggagtgggcgaagtacatcccggccttctgcgagctccccctggacgaccaggtcgccctgctccgggcccacgccggcgagcacctcctgctgggggcgaccaagcgctccatggtgttcaaggacgtgctgctgctcggcaacgactacatcgtcccccggcactgccccgagctggccgagatgagccgcgtgtccatccggatcctggacgagctcgtgctgccgttccaggagctgcagatcgacgacaacgagtacgcctacctcaaggccatcatcttcttcgaccccgacgccaagggcctgagcgaccccgggaagatcaagcgcctgcgcgcgcaggtccaggtgagcctcgaggactacatcaacgaccggcagtacgactcccgcggccggttcggggagctgctgctcctgctgcccacgctccagagcatcacctggcagatgatcgagcagatccagttcatcaagctgttcggcatggcgaagatcgacaacctgctccaggagatgctgctgggcggggcgccgagcgacgcgccccacgcccaccaccccctccacccccacctgatgcaggagcacatgggcaccaacgtgatcgtcgccaacaccatgccgacgcacctgtccaacgggcagatgtgcgagtggccccgcccccggggccaggccgccgcgcccgaggcgccgcagcccgcgccgcccgggggctccggcagcgagccctacaagctgctccccggggccgtggccaccatcgtgcggcccctgtccgccatcccccagccgacgatcaccaagcaggaggtcatcgcctatccttatgatgttcctgattatgcagcctacccctacgacgtgccggactacgccgcctacccctatgacgtgcctgattacgccgcgtgaggactagtccctgttcccagagcccacttttttttctttttttgaaataaaatagcctgtctttcagatctcaaaggctcttttcagagccaccaaaaaaaaaaaaaaaaaaaaaaaaaaaaaaaaaaaaaaaaaaaaaaaaaaaaaaaaaaaaaaaaaaaaaaaaaaaaaaaaaaaaaaaaaaaaaaaaaaaaa

SEQ ID NO: 5597 - RNA, 1790 nt, synthetic construct
  misc_feature 1..1790: note = mRNA a-1 (hSL-A100) (opt1) from Homo sapiens__NP_000448.3__HNF4A(1-474)(S142A_S143A_S148A_S167A_ S313A_S378A_T429A_T432A_S436A_K458R)_HA-tag R9852
  source 1..1790: mol_type = other RNA
aggagagtcccgcagtcggcgtccagcggctctgcttgttcgtgtgtgtgtcgttgcaggccttattcaagcttaccatgcgcctgagcaagaccctcgtggacatggacatggccgactactccgccgcgctggaccccgcctacaccacgctggagttcgagaacgtccaggtgctcaccatgggcaacgacaccagcccgtccgaggggaccaacctgaacgcccccaacagcctgggcgtgtccgccctctgcgccatctgcggggaccgggcgacgggcaagcactacggggccagctcctgcgacggctgcaagggcttcttccgccggagcgtccgcaagaaccacatgtactcctgccggttcagccgccagtgcgtggtggacaaggacaagcggaaccagtgccgctactgccggctgaagaagtgcttccgcgccgggatgaagaaggaggccgtccagaacgagcgggaccgcatctccacccggcgcgcggcctacgaggacagcgcgctgcccagcatcaacgcgctcctgcaggccgaggtgctgtcccggcagatcaccgcgcccgtgtccggcatcaacggggacatccgcgccaagaagatcgccagcatcgccgacgtctgcgagagcatgaaggagcagctcctggtgctggtggagtgggcgaagtacatcccggccttctgcgagctccccctggacgaccaggtcgccctgctccgggcccacgccggcgagcacctcctgctgggggcgaccaagcgctccatggtgttcaaggacgtgctgctgctcggcaacgactacatcgtcccccggcactgccccgagctggccgagatgagccgcgtgtccatccggatcctggacgagctcgtgctgccgttccaggagctgcagatcgacgacaacgagtacgcctacctcaaggccatcatcttcttcgaccccgacgccaagggcctgagcgaccccgggaagatcaagcgcctgcgcgcgcaggtccaggtgagcctcgaggactacatcaacgaccggcagtacgactcccgcggccggttcggggagctgctgctcctgctgcccacgctccagagcatcacctggcagatgatcgagcagatccagttcatcaagctgttcggcatggcgaagatcgacaacctgctccaggagatgctgctgggcggggcgccgagcgacgcgccccacgcccaccaccccctccacccccacctgatgcaggagcacatgggcaccaacgtgatcgtcgccaacaccatgccgacgcacctgtccaacgggcagatgtgcgagtggccccgcccccggggccaggccgccgcgcccgaggcgccgcagcccgcgccgcccgggggctccggcagcgagccctacaagctgctccccggggccgtggccaccatcgtgcggcccctgtccgccatcccccagccgacgatcaccaagcaggaggtcatcgcctatccttatgatgttcctgattatgcagcctacccctacgacgtgccggactacgccgcctacccctatgacgtgcctgattacgccgcgtgaggactagtccctgttcccagagcccacttttttttctttttttgaaataaaatagcctgtctttcagatctcaaaggctcttttcagagccaccaaaaaaaaaaaaaaaaaaaaaaaaaaaaaaaaaaaaaaaaaaaaaaaaaaaaaaaaaaaaaaaaaaaaaaaaaaaaaaaaaaaaaaaaaaaaaaaaaaaaa

SEQ ID NO: 5598 - RNA, 1790 nt, synthetic construct
  misc_feature 1..1790: note = mRNA a-1 (hSL-A100) (opt1) from Homo sapiens__NP_000448.3__HNF4A(1-474)(K106R_K108R_K126R_K127R_ S142A_S143A_S148A_S167A_S313A_S378A_T429A_T432A_S436A_K458R )_HA-tag R9853
  source 1..1790: mol_type = other RNA
aggagagtcccgcagtcggcgtccagcggctctgcttgttcgtgtgtgtgtcgttgcaggccttattcaagcttaccatgcgcctgagcaagaccctcgtggacatggacatggccgactactccgccgcgctggaccccgcctacaccacgctggagttcgagaacgtccaggtgctcaccatgggcaacgacaccagcccgtccgaggggaccaacctgaacgcccccaacagcctgggcgtgtccgccctctgcgccatctgcggggaccgggcgacgggcaagcactacggggccagctcctgcgacggctgcaagggcttcttccgccggagcgtccgcaagaaccacatgtactcctgccggttcagccgccagtgcgtggtggaccgcgaccggcggaaccagtgccgctactgccggctgaagaagtgcttccgcgccgggatgcgccgcgaggccgtccagaacgagcgggaccgcatctccacccggcgcgcggcctacgaggacagcgcgctgcccagcatcaacgcgctcctgcaggccgaggtgctgtcccggcagatcaccgcgcccgtgtccggcatcaacggggacatccgcgccaagaagatcgccagcatcgccgacgtctgcgagagcatgaaggagcagctcctggtgctggtggagtgggcgaagtacatcccggccttctgcgagctccccctggacgaccaggtcgccctgctccgggcccacgccggcgagcacctcctgctgggggcgaccaagcgctccatggtgttcaaggacgtgctgctgctcggcaacgactacatcgtcccccggcactgccccgagctggccgagatgagccgcgtgtccatccggatcctggacgagctcgtgctgccgttccaggagctgcagatcgacgacaacgagtacgcctacctcaaggccatcatcttcttcgaccccgacgccaagggcctgagcgaccccgggaagatcaagcgcctgcgcgcgcaggtccaggtgagcctcgaggactacatcaacgaccggcagtacgactcccgcggccggttcggggagctgctgctcctgctgcccacgctccagagcatcacctggcagatgatcgagcagatccagttcatcaagctgttcggcatggcgaagatcgacaacctgctccaggagatgctgctgggcggggcgccgagcgacgcgccccacgcccaccaccccctccacccccacctgatgcaggagcacatgggcaccaacgtgatcgtcgccaacaccatgccgacgcacctgtccaacgggcagatgtgcgagtggccccgcccccggggccaggccgccgcgcccgaggcgccgcagcccgcgccgcccgggggctccggcagcgagccctacaagctgctccccggggccgtggccaccatcgtgcggcccctgtccgccatcccccagccgacgatcaccaagcaggaggtcatcgcctatccttatgatgttcctgattatgcagcctacccctacgacgtgccggactacgccgcctacccctatgacgtgcctgattacgccgcgtgaggactagtccctgttcccagagcccacttttttttctttttttgaaataaaatagcctgtctttcagatctcaaaggctcttttcagagccaccaaaaaaaaaaaaaaaaaaaaaaaaaaaaaaaaaaaaaaaaaaaaaaaaaaaaaaaaaaaaaaaaaaaaaaaaaaaaaaaaaaaaaaaaaaaaaaaaaaaaa

SEQ ID NO: 5599 - RNA, 1790 nt, synthetic construct
  misc_feature 1..1790: note = mRNA a-1 (hSL-A100) (opt1) from Homo sapiens__NP_000448.3__HNF4A(1-474)(S142A_S143A_S148A_T166A_ S167A_S313A_S378A_T429A_T432A_S436A_K458R)_HA-tag R9873
  source 1..1790: mol_type = other RNA
aggagagtcccgcagtcggcgtccagcggctctgcttgttcgtgtgtgtgtcgttgcaggccttattcaagcttaccatgcgcctgagcaagaccctcgtggacatggacatggccgactactccgccgcgctggaccccgcctacaccacgctggagttcgagaacgtccaggtgctcaccatgggcaacgacaccagcccgtccgaggggaccaacctgaacgcccccaacagcctgggcgtgtccgccctctgcgccatctgcggggaccgggcgacgggcaagcactacggggccagctcctgcgacggctgcaagggcttcttccgccggagcgtccgcaagaaccacatgtactcctgccggttcagccgccagtgcgtggtggacaaggacaagcggaaccagtgccgctactgccggctgaagaagtgcttccgcgccgggatgaagaaggaggccgtccagaacgagcgggaccgcatctccacccggcgcgcggcctacgaggacagcgcgctgcccagcatcaacgcgctcctgcaggccgaggtgctgtcccggcagatcgcggcgcccgtgtccggcatcaacggggacatccgcgccaagaagatcgccagcatcgccgacgtctgcgagagcatgaaggagcagctcctggtgctggtggagtgggcgaagtacatcccggccttctgcgagctccccctggacgaccaggtcgccctgctccgggcccacgccggcgagcacctcctgctgggggcgaccaagcgctccatggtgttcaaggacgtgctgctgctcggcaacgactacatcgtcccccggcactgccccgagctggccgagatgagccgcgtgtccatccggatcctggacgagctcgtgctgccgttccaggagctgcagatcgacgacaacgagtacgcctacctcaaggccatcatcttcttcgaccccgacgccaagggcctgagcgaccccgggaagatcaagcgcctgcgcgcgcaggtccaggtgagcctcgaggactacatcaacgaccggcagtacgactcccgcggccggttcggggagctgctgctcctgctgcccacgctccagagcatcacctggcagatgatcgagcagatccagttcatcaagctgttcggcatggcgaagatcgacaacctgctccaggagatgctgctgggcggggcgccgagcgacgcgccccacgcccaccaccccctccacccccacctgatgcaggagcacatgggcaccaacgtgatcgtcgccaacaccatgccgacgcacctgtccaacgggcagatgtgcgagtggccccgcccccggggccaggccgccgcgcccgaggcgccgcagcccgcgccgcccgggggctccggcagcgagccctacaagctgctccccggggccgtggccaccatcgtgcggcccctgtccgccatcccccagccgacgatcaccaagcaggaggtcatcgcctatccttatgatgttcctgattatgcagcctacccctacgacgtgccggactacgccgcctacccctatgacgtgcctgattacgccgcgtgaggactagtccctgttcccagagcccacttttttttctttttttgaaataaaatagcctgtctttcagatctcaaaggctcttttcagagccaccaaaaaaaaaaaaaaaaaaaaaaaaaaaaaaaaaaaaaaaaaaaaaaaaaaaaaaaaaaaaaaaaaaaaaaaaaaaaaaaaaaaaaaaaaaaaaaaaaaaaa

SEQ ID NO: 5600 - RNA, 1790 nt, synthetic construct
  misc_feature 1..1790: note = mRNA a-1 (hSL-A100) (opt1) from Homo sapiens__NP_000448.3__HNF4A(1-474)(S87A_S142A_S143A_S148A_T 166A_S167A_S313A_S378A_T429A_T432A_S436A_K458R)_HA-tag R9874
  source 1..1790: mol_type = other RNA
aggagagtcccgcagtcggcgtccagcggctctgcttgttcgtgtgtgtgtcgttgcaggccttattcaagcttaccatgcgcctgagcaagaccctcgtggacatggacatggccgactactccgccgcgctggaccccgcctacaccacgctggagttcgagaacgtccaggtgctcaccatgggcaacgacaccagcccgtccgaggggaccaacctgaacgcccccaacagcctgggcgtgtccgccctctgcgccatctgcggggaccgggcgacgggcaagcactacggggccagctcctgcgacggctgcaagggcttcttccgccgggcggtccgcaagaaccacatgtactcctgccggttcagccgccagtgcgtggtggacaaggacaagcggaaccagtgccgctactgccggctgaagaagtgcttccgcgccgggatgaagaaggaggccgtccagaacgagcgggaccgcatctccacccggcgcgcggcctacgaggacagcgcgctgcccagcatcaacgcgctcctgcaggccgaggtgctgtcccggcagatcgcggcgcccgtgtccggcatcaacggggacatccgcgccaagaagatcgccagcatcgccgacgtctgcgagagcatgaaggagcagctcctggtgctggtggagtgggcgaagtacatcccggccttctgcgagctccccctggacgaccaggtcgccctgctccgggcccacgccggcgagcacctcctgctgggggcgaccaagcgctccatggtgttcaaggacgtgctgctgctcggcaacgactacatcgtcccccggcactgccccgagctggccgagatgagccgcgtgtccatccggatcctggacgagctcgtgctgccgttccaggagctgcagatcgacgacaacgagtacgcctacctcaaggccatcatcttcttcgaccccgacgccaagggcctgagcgaccccgggaagatcaagcgcctgcgcgcgcaggtccaggtgagcctcgaggactacatcaacgaccggcagtacgactcccgcggccggttcggggagctgctgctcctgctgcccacgctccagagcatcacctggcagatgatcgagcagatccagttcatcaagctgttcggcatggcgaagatcgacaacctgctccaggagatgctgctgggcggggcgccgagcgacgcgccccacgcccaccaccccctccacccccacctgatgcaggagcacatgggcaccaacgtgatcgtcgccaacaccatgccgacgcacctgtccaacgggcagatgtgcgagtggccccgcccccggggccaggccgccgcgcccgaggcgccgcagcccgcgccgcccgggggctccggcagcgagccctacaagctgctccccggggccgtggccaccatcgtgcggcccctgtccgccatcccccagccgacgatcaccaagcaggaggtcatcgcctatccttatgatgttcctgattatgcagcctacccctacgacgtgccggactacgccgcctacccctatgacgtgcctgattacgccgcgtgaggactagtccctgttcccagagcccacttttttttctttttttgaaataaaatagcctgtctttcagatctcaaaggctcttttcagagccaccaaaaaaaaaaaaaaaaaaaaaaaaaaaaaaaaaaaaaaaaaaaaaaaaaaaaaaaaaaaaaaaaaaaaaaaaaaaaaaaaaaaaaaaaaaaaaaaaaaaaa

SEQ ID NO: 5601 - RNA, 1790 nt, synthetic construct
  misc_feature 1..1790: note = mRNA a-1 (hSL-A100) (opt1) from Homo sapiens__NP_000448.3__HNF4A(1-474)(S87A_K106R_K108R_K126R_K 127R_S142A_S143A_S148A_T166A_S167A_S313A_S378A_T429A_T432A_ S436A_K458R)_HA-tag R9875
  source 1..1790: mol_type = other RNA
aggagagtcccgcagtcggcgtccagcggctctgcttgttcgtgtgtgtgtcgttgcaggccttattcaagcttaccatgcgcctgagcaagaccctcgtggacatggacatggccgactactccgccgcgctggaccccgcctacaccacgctggagttcgagaacgtccaggtgctcaccatgggcaacgacaccagcccgtccgaggggaccaacctgaacgcccccaacagcctgggcgtgtccgccctctgcgccatctgcggggaccgggcgacgggcaagcactacggggccagctcctgcgacggctgcaagggcttcttccgccgggcggtccgcaagaaccacatgtactcctgccggttcagccgccagtgcgtggtggaccgcgaccggcggaaccagtgccgctactgccggctgaagaagtgcttccgcgccgggatgcgccgcgaggccgtccagaacgagcgggaccgcatctccacccggcgcgcggcctacgaggacagcgcgctgcccagcatcaacgcgctcctgcaggccgaggtgctgtcccggcagatcgcggcgcccgtgtccggcatcaacggggacatccgcgccaagaagatcgccagcatcgccgacgtctgcgagagcatgaaggagcagctcctggtgctggtggagtgggcgaagtacatcccggccttctgcgagctccccctggacgaccaggtcgccctgctccgggcccacgccggcgagcacctcctgctgggggcgaccaagcgctccatggtgttcaaggacgtgctgctgctcggcaacgactacatcgtcccccggcactgccccgagctggccgagatgagccgcgtgtccatccggatcctggacgagctcgtgctgccgttccaggagctgcagatcgacgacaacgagtacgcctacctcaaggccatcatcttcttcgaccccgacgccaagggcctgagcgaccccgggaagatcaagcgcctgcgcgcgcaggtccaggtgagcctcgaggactacatcaacgaccggcagtacgactcccgcggccggttcggggagctgctgctcctgctgcccacgctccagagcatcacctggcagatgatcgagcagatccagttcatcaagctgttcggcatggcgaagatcgacaacctgctccaggagatgctgctgggcggggcgccgagcgacgcgccccacgcccaccaccccctccacccccacctgatgcaggagcacatgggcaccaacgtgatcgtcgccaacaccatgccgacgcacctgtccaacgggcagatgtgcgagtggccccgcccccggggccaggccgccgcgcccgaggcgccgcagcccgcgccgcccgggggctccggcagcgagccctacaagctgctccccggggccgtggccaccatcgtgcggcccctgtccgccatcccccagccgacgatcaccaagcaggaggtcatcgcctatccttatgatgttcctgattatgcagcctacccctacgacgtgccggactacgccgcctacccctatgacgtgcctgattacgccgcgtgaggactagtccctgttcccagagcccacttttttttctttttttgaaataaaatagcctgtctttcagatctcaaaggctcttttcagagccaccaaaaaaaaaaaaaaaaaaaaaaaaaaaaaaaaaaaaaaaaaaaaaaaaaaaaaaaaaaaaaaaaaaaaaaaaaaaaaaaaaaaaaaaaaaaaaaaaaaaaa

SEQ ID NO: 5602 - RNA, 1790 nt, synthetic construct
  misc_feature 1..1790: note = mRNA a-1 (hSL-A100) (opt1) from Homo sapiens__NP_000448.3__HNF4A(1-474)(S87A_K106R_K108R_K126R_K 127R)_HA-tag R10313
  source 1..1790: mol_type = other RNA
aggagagtcccgcagtcggcgtccagcggctctgcttgttcgtgtgtgtgtcgttgcaggccttattcaagcttaccatgcgcctgagcaagaccctcgtggacatggacatggccgactactccgccgcgctggaccccgcctacaccacgctggagttcgagaacgtccaggtgctcaccatgggcaacgacaccagcccgtccgaggggaccaacctgaacgcccccaacagcctgggcgtgtccgccctctgcgccatctgcggggaccgggcgacgggcaagcactacggggccagctcctgcgacggctgcaagggcttcttccgccgggcggtccgcaagaaccacatgtactcctgccggttcagccgccagtgcgtggtggaccgcgaccggcggaaccagtgccgctactgccggctgaagaagtgcttccgcgccgggatgcgccgggaggccgtccagaacgagcgggaccgcatctccacccggcgcagctcctacgaggacagctccctgcccagcatcaacgcgctcctgcaggccgaggtgctgtcccggcagatcaccagccccgtgtccggcatcaacggggacatccgcgccaagaagatcgccagcatcgccgacgtctgcgagagcatgaaggagcagctcctggtgctggtggagtgggcgaagtacatcccggccttctgcgagctccccctggacgaccaggtcgccctgctccgggcccacgccggcgagcacctcctgctgggggcgaccaagcgctccatggtgttcaaggacgtgctgctgctcggcaacgactacatcgtcccccggcactgccccgagctggccgagatgagccgcgtgtccatccggatcctggacgagctcgtgctgccgttccaggagctgcagatcgacgacaacgagtacgcctacctcaaggccatcatcttcttcgaccccgacgccaagggcctgagcgaccccgggaagatcaagcgcctgcgctcccaggtccaggtgagcctcgaggactacatcaacgaccggcagtacgactcccgcggccggttcggggagctgctgctcctgctgcccacgctccagagcatcacctggcagatgatcgagcagatccagttcatcaagctgttcggcatggcgaagatcgacaacctgctccaggagatgctgctgggcgggtccccgagcgacgcgccccacgcccaccaccccctccacccccacctgatgcaggagcacatgggcaccaacgtgatcgtcgccaacaccatgccgacgcacctgtccaacgggcagatgtgcgagtggccccgcccccggggccaggccgccacccccgagaccccgcagcccagcccgcccgggggctccggcagcgagccctacaagctgctccccggggccgtggccaccatcgtgaagcccctgtccgccatcccccagccgacgatcaccaagcaggaggtcatcgcctatccttatgatgttcctgattatgcagcctacccctacgacgtgccggactacgccgcctacccctatgacgtgcctgattacgccgcgtgaggactagtccctgttcccagagcccacttttttttctttttttgaaataaaatagcctgtctttcagatctcaaaggctcttttcagagccaccaaaaaaaaaaaaaaaaaaaaaaaaaaaaaaaaaaaaaaaaaaaaaaaaaaaaaaaaaaaaaaaaaaaaaaaaaaaaaaaaaaaaaaaaaaaaaaaaaaaaa

SEQ ID NO: 5603 - RNA, 1790 nt, synthetic construct
  misc_feature 1..1790: note = mRNA a-1 (hSL-A100) (opt1) from Homo sapiens__NP_000448.3__HNF4A(1-474)(S87A_K106R_K108R_K126R_K 127R_S142A_S143A_S148A_T166A_S167A_S313A_S378A_T429A_T432A_ S436A_K458R_S461A)_HA-tag R10314
  source 1..1790: mol_type = other RNA
aggagagtcccgcagtcggcgtccagcggctctgcttgttcgtgtgtgtgtcgttgcaggccttattcaagcttaccatgcgcctgagcaagaccctcgtggacatggacatggccgactactccgccgcgctggaccccgcctacaccacgctggagttcgagaacgtccaggtgctcaccatgggcaacgacaccagcccgtccgaggggaccaacctgaacgcccccaacagcctgggcgtgtccgccctctgcgccatctgcggggaccgggcgacgggcaagcactacggggccagctcctgcgacggctgcaagggcttcttccgccgggcggtccgcaagaaccacatgtactcctgccggttcagccgccagtgcgtggtggaccgcgaccggcggaaccagtgccgctactgccggctgaagaagtgcttccgcgccgggatgcgccgggaggccgtccagaacgagcgggaccgcatctccacccggcgcgccgcctacgaggacagcgccctgcccagcatcaacgcgctcctgcaggccgaggtgctgtcccggcagatcgccgcgcccgtgtccggcatcaacggggacatccgcgccaagaagatcgccagcatcgccgacgtctgcgagagcatgaaggagcagctcctggtgctggtggagtgggcgaagtacatcccggccttctgcgagctccccctggacgaccaggtcgccctgctccgggcccacgccggcgagcacctcctgctgggggcgaccaagcgctccatggtgttcaaggacgtgctgctgctcggcaacgactacatcgtcccccggcactgccccgagctggccgagatgagccgcgtgtccatccggatcctggacgagctcgtgctgccgttccaggagctgcagatcgacgacaacgagtacgcctacctcaaggccatcatcttcttcgaccccgacgccaagggcctgagcgaccccgggaagatcaagcgcctgcgcgcccaggtccaggtgagcctcgaggactacatcaacgaccggcagtacgactcccgcggccggttcggggagctgctgctcctgctgcccacgctccagagcatcacctggcagatgatcgagcagatccagttcatcaagctgttcggcatggcgaagatcgacaacctgctccaggagatgctgctgggcggggccccgagcgacgcgccccacgcccaccaccccctccacccccacctgatgcaggagcacatgggcaccaacgtgatcgtcgccaacaccatgccgacgcacctgtccaacgggcagatgtgcgagtggccccgcccccggggccaggccgccgcccccgaggccccgcagcccgcgccgcccgggggctccggcagcgagccctacaagctgctccccggggccgtggccaccatcgtgcggcccctggccgccatcccccagccgacgatcaccaagcaggaggtcatcgcctatccttatgatgttcctgattatgcagcctacccctacgacgtgccggactacgccgcctacccctatgacgtgcctgattacgccgcgtgaggactagtccctgttcccagagcccacttttttttctttttttgaaataaaatagcctgtctttcagatctcaaaggctcttttcagagccaccaaaaaaaaaaaaaaaaaaaaaaaaaaaaaaaaaaaaaaaaaaaaaaaaaaaaaaaaaaaaaaaaaaaaaaaaaaaaaaaaaaaaaaaaaaaaaaaaaaaaa

SEQ ID NO: 5604 - RNA, 1790 nt, synthetic construct
  misc_feature 1..1790: note = mRNA a-1 (hSL-A100) (opt1) from Homo sapiens__NP_000448.3__HNF4A(1-474)(S87A_K106R_K108R_K126R_K 127R_S142A_S143A_S148A_T166A_S167A_S313A_S378A_T429A_T432A_ S436A_K458R_S461E)_HA-tag R10315
  source 1..1790: mol_type = other RNA
aggagagtcccgcagtcggcgtccagcggctctgcttgttcgtgtgtgtgtcgttgcaggccttattcaagcttaccatgcgcctgagcaagaccctcgtggacatggacatggccgactactccgccgcgctggaccccgcctacaccacgctggagttcgagaacgtccaggtgctcaccatgggcaacgacaccagcccgtccgaggggaccaacctgaacgcccccaacagcctgggcgtgtccgccctctgcgccatctgcggggaccgggcgacgggcaagcactacggggccagctcctgcgacggctgcaagggcttcttccgccgggcggtccgcaagaaccacatgtactcctgccggttcagccgccagtgcgtggtggaccgcgaccggcggaaccagtgccgctactgccggctgaagaagtgcttccgcgccgggatgcgccgggaggccgtccagaacgagcgggaccgcatctccacccggcgcgccgcctacgaggacagcgccctgcccagcatcaacgcgctcctgcaggccgaggtgctgtcccggcagatcgccgcgcccgtgtccggcatcaacggggacatccgcgccaagaagatcgccagcatcgccgacgtctgcgagagcatgaaggagcagctcctggtgctggtggagtgggcgaagtacatcccggccttctgcgagctccccctggacgaccaggtcgccctgctccgggcccacgccggcgagcacctcctgctgggggcgaccaagcgctccatggtgttcaaggacgtgctgctgctcggcaacgactacatcgtcccccggcactgccccgagctggccgagatgagccgcgtgtccatccggatcctggacgagctcgtgctgccgttccaggagctgcagatcgacgacaacgagtacgcctacctcaaggccatcatcttcttcgaccccgacgccaagggcctgagcgaccccgggaagatcaagcgcctgcgcgcccaggtccaggtgagcctcgaggactacatcaacgaccggcagtacgactcccgcggccggttcggggagctgctgctcctgctgcccacgctccagagcatcacctggcagatgatcgagcagatccagttcatcaagctgttcggcatggcgaagatcgacaacctgctccaggagatgctgctgggcggggccccgagcgacgcgccccacgcccaccaccccctccacccccacctgatgcaggagcacatgggcaccaacgtgatcgtcgccaacaccatgccgacgcacctgtccaacgggcagatgtgcgagtggccccgcccccggggccaggccgccgcccccgaggccccgcagcccgcgccgcccgggggctccggcagcgagccctacaagctgctccccggggccgtggccaccatcgtgcggcccctggaggccatcccccagccgacgatcaccaagcaggaggtcatcgcctatccttatgatgttcctgattatgcagcctacccctacgacgtgccggactacgccgcctacccctatgacgtgcctgattacgccgcgtgaggactagtccctgttcccagagcccacttttttttctttttttgaaataaaatagcctgtctttcagatctcaaaggctcttttcagagccaccaaaaaaaaaaaaaaaaaaaaaaaaaaaaaaaaaaaaaaaaaaaaaaaaaaaaaaaaaaaaaaaaaaaaaaaaaaaaaaaaaaaaaaaaaaaaaaaaaaaaa

SEQ ID NO: 5605 - RNA, 1790 nt, synthetic construct
  misc_feature 1..1790: note = mRNA a-1 (hSL-A100) (opt1) from Homo sapiens__NP_000448.3__HNF4A(1-474)(S87A_K106R_K108R_K126R_K 127R_S142A_S143A_S148E_T166A_S167E_S313A_S378E_T429E_T432E_ S436E_K458R_S461E)_HA-tag R10316
  source 1..1790: mol_type = other RNA
aggagagtcccgcagtcggcgtccagcggctctgcttgttcgtgtgtgtgtcgttgcaggccttattcaagcttaccatgcgcctgagcaagaccctcgtggacatggacatggccgactactccgccgcgctggaccccgcctacaccacgctggagttcgagaacgtccaggtgctcaccatgggcaacgacaccagcccgtccgaggggaccaacctgaacgcccccaacagcctgggcgtgtccgccctctgcgccatctgcggggaccgggcgacgggcaagcactacggggccagctcctgcgacggctgcaagggcttcttccgccgggcggtccgcaagaaccacatgtactcctgccggttcagccgccagtgcgtggtggaccgcgaccggcggaaccagtgccgctactgccggctgaagaagtgcttccgcgccgggatgcgccgggaggccgtccagaacgagcgggaccgcatctccacccggcgcgccgcctacgaggacagcgagctgcccagcatcaacgcgctcctgcaggccgaggtgctgtcccggcagatcgccgagcccgtgtccggcatcaacggggacatccgcgccaagaagatcgccagcatcgccgacgtctgcgagagcatgaaggagcagctcctggtgctggtggagtgggcgaagtacatcccggccttctgcgagctccccctggacgaccaggtcgccctgctccgggcccacgccggcgagcacctcctgctgggggcgaccaagcgctccatggtgttcaaggacgtgctgctgctcggcaacgactacatcgtcccccggcactgccccgagctggccgagatgagccgcgtgtccatccggatcctggacgagctcgtgctgccgttccaggagctgcagatcgacgacaacgagtacgcctacctcaaggccatcatcttcttcgaccccgacgccaagggcctgagcgaccccgggaagatcaagcgcctgcgcgcccaggtccaggtgagcctcgaggactacatcaacgaccggcagtacgactcccgcggccggttcggggagctgctgctcctgctgcccacgctccagagcatcacctggcagatgatcgagcagatccagttcatcaagctgttcggcatggcgaagatcgacaacctgctccaggagatgctgctgggcggggagccgagcgacgcgccccacgcccaccaccccctccacccccacctgatgcaggagcacatgggcaccaacgtgatcgtcgccaacaccatgccgacgcacctgtccaacgggcagatgtgcgagtggccccgcccccggggccaggccgccgagcccgaggagccgcagcccgagccgcccgggggctccggcagcgagccctacaagctgctccccggggccgtggccaccatcgtgcggcccctggaggccatcccccagccgacgatcaccaagcaggaggtcatcgcctatccttatgatgttcctgattatgcagcctacccctacgacgtgccggactacgccgcctacccctatgacgtgcctgattacgccgcgtgaggactagtccctgttcccagagcccacttttttttctttttttgaaataaaatagcctgtctttcagatctcaaaggctcttttcagagccaccaaaaaaaaaaaaaaaaaaaaaaaaaaaaaaaaaaaaaaaaaaaaaaaaaaaaaaaaaaaaaaaaaaaaaaaaaaaaaaaaaaaaaaaaaaaaaaaaaaaaa

SEQ ID NO: 5606 - RNA, 1790 nt, synthetic construct
  misc_feature 1..1790: note = mRNA a-1 (hSL-A100) (opt1) from Homo sapiens__NP_000448.3__HNF4A(1-474)(S87A_K106R_K108R_K126R_K 127R_S142A_S143A_S148A_T166A_S167A_K179R_K180R_S313A_S378A_ T429A_T432A_S436A_K458R_S461E)_HA-tag R10317
  source 1..1790: mol_type = other RNA
aggagagtcccgcagtcggcgtccagcggctctgcttgttcgtgtgtgtgtcgttgcaggccttattcaagcttaccatgcgcctgagcaagaccctcgtggacatggacatggccgactactccgccgcgctggaccccgcctacaccacgctggagttcgagaacgtccaggtgctcaccatgggcaacgacaccagcccgtccgaggggaccaacctgaacgcccccaacagcctgggcgtgtccgccctctgcgccatctgcggggaccgggcgacgggcaagcactacggggccagctcctgcgacggctgcaagggcttcttccgccgggcggtccgcaagaaccacatgtactcctgccggttcagccgccagtgcgtggtggaccgcgaccggcggaaccagtgccgctactgccggctgaagaagtgcttccgcgccgggatgcgccgggaggccgtccagaacgagcgggaccgcatctccacccggcgcgccgcctacgaggacagcgccctgcccagcatcaacgcgctcctgcaggccgaggtgctgtcccggcagatcgccgcgcccgtgtccggcatcaacggggacatccgcgcccgccggatcgccagcatcgccgacgtctgcgagagcatgaaggagcagctcctggtgctggtggagtgggcgaagtacatcccggccttctgcgagctccccctggacgaccaggtcgccctgctccgggcccacgccggcgagcacctcctgctgggggcgaccaagcgctccatggtgttcaaggacgtgctgctgctcggcaacgactacatcgtcccccggcactgccccgagctggccgagatgagccgcgtgtccatccggatcctggacgagctcgtgctgccgttccaggagctgcagatcgacgacaacgagtacgcctacctcaaggccatcatcttcttcgaccccgacgccaagggcctgagcgaccccgggaagatcaagcgcctgcgcgcccaggtccaggtgagcctcgaggactacatcaacgaccggcagtacgactcccgcggccggttcggggagctgctgctcctgctgcccacgctccagagcatcacctggcagatgatcgagcagatccagttcatcaagctgttcggcatggcgaagatcgacaacctgctccaggagatgctgctgggcggggccccgagcgacgcgccccacgcccaccaccccctccacccccacctgatgcaggagcacatgggcaccaacgtgatcgtcgccaacaccatgccgacgcacctgtccaacgggcagatgtgcgagtggccccgcccccggggccaggccgccgcccccgaggccccgcagcccgcgccgcccgggggctccggcagcgagccctacaagctgctccccggggccgtggccaccatcgtgcggcccctggaggccatcccccagccgacgatcaccaagcaggaggtcatcgcctatccttatgatgttcctgattatgcagcctacccctacgacgtgccggactacgccgcctacccctatgacgtgcctgattacgccgcgtgaggactagtccctgttcccagagcccacttttttttctttttttgaaataaaatagcctgtctttcagatctcaaaggctcttttcagagccaccaaaaaaaaaaaaaaaaaaaaaaaaaaaaaaaaaaaaaaaaaaaaaaaaaaaaaaaaaaaaaaaaaaaaaaaaaaaaaaaaaaaaaaaaaaaaaaaaaaaaa

SEQ ID NO: 5607 - RNA, 1790 nt, synthetic construct
  misc_feature 1..1790: note = mRNA a-1 (hSL-A100) (opt1) from Homo sapiens__NP_000448.3__HNF4A(1-474)(S87A_K106R_K108R_K126R_K 127R_S142A_S143A_S148A_T166A_S167A_K300R_K307R_K309R_S313A_ S378A_T429A_T432A_S436A_K458R_S461E)_HA-tag R10318
  source 1..1790: mol_type = other RNA
aggagagtcccgcagtcggcgtccagcggctctgcttgttcgtgtgtgtgtcgttgcaggccttattcaagcttaccatgcgcctgagcaagaccctcgtggacatggacatggccgactactccgccgcgctggaccccgcctacaccacgctggagttcgagaacgtccaggtgctcaccatgggcaacgacaccagcccgtccgaggggaccaacctgaacgcccccaacagcctgggcgtgtccgccctctgcgccatctgcggggaccgggcgacgggcaagcactacggggccagctcctgcgacggctgcaagggcttcttccgccgggcggtccgcaagaaccacatgtactcctgccggttcagccgccagtgcgtggtggaccgcgaccggcggaaccagtgccgctactgccggctgaagaagtgcttccgcgccgggatgcgccgggaggccgtccagaacgagcgggaccgcatctccacccggcgcgccgcctacgaggacagcgccctgcccagcatcaacgcgctcctgcaggccgaggtgctgtcccggcagatcgccgcgcccgtgtccggcatcaacggggacatccgcgccaagaagatcgccagcatcgccgacgtctgcgagagcatgaaggagcagctcctggtgctggtggagtgggcgaagtacatcccggccttctgcgagctccccctggacgaccaggtcgccctgctccgggcccacgccggcgagcacctcctgctgggggcgaccaagcgctccatggtgttcaaggacgtgctgctgctcggcaacgactacatcgtcccccggcactgccccgagctggccgagatgagccgcgtgtccatccggatcctggacgagctcgtgctgccgttccaggagctgcagatcgacgacaacgagtacgcctacctcaaggccatcatcttcttcgaccccgacgcccgcggcctgagcgaccccgggcggatccgccgcctgcgcgcccaggtccaggtgagcctcgaggactacatcaacgaccggcagtacgactcccgcggccggttcggggagctgctgctcctgctgcccacgctccagagcatcacctggcagatgatcgagcagatccagttcatcaagctgttcggcatggcgaagatcgacaacctgctccaggagatgctgctgggcggggccccgagcgacgcgccccacgcccaccaccccctccacccccacctgatgcaggagcacatgggcaccaacgtgatcgtcgccaacaccatgccgacgcacctgtccaacgggcagatgtgcgagtggccccgcccccggggccaggccgccgcccccgaggccccgcagcccgcgccgcccgggggctccggcagcgagccctacaagctgctccccggggccgtggccaccatcgtgcggcccctggaggccatcccccagccgacgatcaccaagcaggaggtcatcgcctatccttatgatgttcctgattatgcagcctacccctacgacgtgccggactacgccgcctacccctatgacgtgcctgattacgccgcgtgaggactagtccctgttcccagagcccacttttttttctttttttgaaataaaatagcctgtctttcagatctcaaaggctcttttcagagccaccaaaaaaaaaaaaaaaaaaaaaaaaaaaaaaaaaaaaaaaaaaaaaaaaaaaaaaaaaaaaaaaaaaaaaaaaaaaaaaaaaaaaaaaaaaaaaaaaaaaaa

SEQ ID NO: 5608 - RNA, 1790 nt, synthetic construct
  misc_feature 1..1790: note = mRNA a-1 (hSL-A100) (opt1) from Homo sapiens__NP_000448.3__HNF4A(1-474)(S87A_K106R_K108R_K126R_K 127R_S142A_S143A_S148A_T166A_S167A_S313A_S378A_T429A_T432A_ S436A_K447R_K458R_S461E_K470R)_HA-tag R10319
  source 1..1790: mol_type = other RNA
aggagagtcccgcagtcggcgtccagcggctctgcttgttcgtgtgtgtgtcgttgcaggccttattcaagcttaccatgcgcctgagcaagaccctcgtggacatggacatggccgactactccgccgcgctggaccccgcctacaccacgctggagttcgagaacgtccaggtgctcaccatgggcaacgacaccagcccgtccgaggggaccaacctgaacgcccccaacagcctgggcgtgtccgccctctgcgccatctgcggggaccgggcgacgggcaagcactacggggccagctcctgcgacggctgcaagggcttcttccgccgggcggtccgcaagaaccacatgtactcctgccggttcagccgccagtgcgtggtggaccgcgaccggcggaaccagtgccgctactgccggctgaagaagtgcttccgcgccgggatgcgccgggaggccgtccagaacgagcgggaccgcatctccacccggcgcgccgcctacgaggacagcgccctgcccagcatcaacgcgctcctgcaggccgaggtgctgtcccggcagatcgccgcgcccgtgtccggcatcaacggggacatccgcgccaagaagatcgccagcatcgccgacgtctgcgagagcatgaaggagcagctcctggtgctggtggagtgggcgaagtacatcccggccttctgcgagctccccctggacgaccaggtcgccctgctccgggcccacgccggcgagcacctcctgctgggggcgaccaagcgctccatggtgttcaaggacgtgctgctgctcggcaacgactacatcgtcccccggcactgccccgagctggccgagatgagccgcgtgtccatccggatcctggacgagctcgtgctgccgttccaggagctgcagatcgacgacaacgagtacgcctacctcaaggccatcatcttcttcgaccccgacgccaagggcctgagcgaccccgggaagatcaagcgcctgcgcgcccaggtccaggtgagcctcgaggactacatcaacgaccggcagtacgactcccgcggccggttcggggagctgctgctcctgctgcccacgctccagagcatcacctggcagatgatcgagcagatccagttcatcaagctgttcggcatggcgaagatcgacaacctgctccaggagatgctgctgggcggggccccgagcgacgcgccccacgcccaccaccccctccacccccacctgatgcaggagcacatgggcaccaacgtgatcgtcgccaacaccatgccgacgcacctgtccaacgggcagatgtgcgagtggccccgcccccggggccaggccgccgcccccgaggccccgcagcccgcgccgcccgggggctccggcagcgagccctaccgcctgctccccggggccgtggccaccatcgtgcggcccctggaggccatcccccagccgacgatcacccggcaggaggtcatcgcctatccttatgatgttcctgattatgcagcctacccctacgacgtgccggactacgccgcctacccctatgacgtgcctgattacgccgcgtgaggactagtccctgttcccagagcccacttttttttctttttttgaaataaaatagcctgtctttcagatctcaaaggctcttttcagagccaccaaaaaaaaaaaaaaaaaaaaaaaaaaaaaaaaaaaaaaaaaaaaaaaaaaaaaaaaaaaaaaaaaaaaaaaaaaaaaaaaaaaaaaaaaaaaaaaaaaaaa

SEQ ID NO: 5609 - RNA, 1790 nt, synthetic construct
  misc_feature 1..1790: note = mRNA a-1 (hSL-A100) (opt1) from Homo sapiens__NP_000448.3__HNF4A(1-474)(S87A_K106R_K108R_K126R_K 127R_S142A_S143A_S148A_T166A_S167A_K179R_K180R_K234R_K300R_ K307R_K309R_S313A_S378A_T429A_T432A_S436A_K447R_K458R_S461E _K470R)_HA-tag R10320
  source 1..1790: mol_type = other RNA
aggagagtcccgcagtcggcgtccagcggctctgcttgttcgtgtgtgtgtcgttgcaggccttattcaagcttaccatgcgcctgagcaagaccctcgtggacatggacatggccgactactccgccgcgctggaccccgcctacaccacgctggagttcgagaacgtccaggtgctcaccatgggcaacgacaccagcccgtccgaggggaccaacctgaacgcccccaacagcctgggcgtgtccgccctctgcgccatctgcggggaccgggcgacgggcaagcactacggggccagctcctgcgacggctgcaagggcttcttccgccgggcggtccgcaagaaccacatgtactcctgccggttcagccgccagtgcgtggtggaccgcgaccggcggaaccagtgccgctactgccggctgaagaagtgcttccgcgccgggatgcgccgggaggccgtccagaacgagcgggaccgcatctccacccggcgcgccgcctacgaggacagcgccctgcccagcatcaacgcgctcctgcaggccgaggtgctgtcccggcagatcgccgcgcccgtgtccggcatcaacggggacatccgcgcccgccggatcgccagcatcgccgacgtctgcgagagcatgaaggagcagctcctggtgctggtggagtgggcgaagtacatcccggccttctgcgagctccccctggacgaccaggtcgccctgctccgggcccacgccggcgagcacctcctgctgggggcgacccggcgctccatggtgttcaaggacgtgctgctgctcggcaacgactacatcgtcccccggcactgccccgagctggccgagatgagccgcgtgtccatccggatcctggacgagctcgtgctgccgttccaggagctgcagatcgacgacaacgagtacgcctacctcaaggccatcatcttcttcgaccccgacgcccgcggcctgagcgaccccgggcggatccgccgcctgcgcgcccaggtccaggtgagcctcgaggactacatcaacgaccggcagtacgactcccgcggccggttcggggagctgctgctcctgctgcccacgctccagagcatcacctggcagatgatcgagcagatccagttcatcaagctgttcggcatggcgaagatcgacaacctgctccaggagatgctgctgggcggggccccgagcgacgcgccccacgcccaccaccccctccacccccacctgatgcaggagcacatgggcaccaacgtgatcgtcgccaacaccatgccgacgcacctgtccaacgggcagatgtgcgagtggccccgcccccggggccaggccgccgcccccgaggccccgcagcccgcgccgcccgggggctccggcagcgagccctaccgcctgctccccggggccgtggccaccatcgtgcggcccctggaggccatcccccagccgacgatcacccggcaggaggtcatcgcctatccttatgatgttcctgattatgcagcctacccctacgacgtgccggactacgccgcctacccctatgacgtgcctgattacgccgcgtgaggactagtccctgttcccagagcccacttttttttctttttttgaaataaaatagcctgtctttcagatctcaaaggctcttttcagagccaccaaaaaaaaaaaaaaaaaaaaaaaaaaaaaaaaaaaaaaaaaaaaaaaaaaaaaaaaaaaaaaaaaaaaaaaaaaaaaaaaaaaaaaaaaaaaaaaaaaaaa

SEQ ID NO: 5610 - RNA, 1790 nt, synthetic construct
  misc_feature 1..1790: note = mRNA a-1 (hSL-A100) (opt1) from Homo sapiens__NP_000448.3__HNF4A(1-474)(S87A_S95A_S99A_K106R_K10 8R_K126R_K127R_S142A_S143A_S148A_T166A_S167A_S313A_S378A_T4 29A_T432A_S436A_K458R_S461E)_HA-tag R10321
  source 1..1790: mol_type = other RNA
aggagagtcccgcagtcggcgtccagcggctctgcttgttcgtgtgtgtgtcgttgcaggccttattcaagcttaccatgcgcctgagcaagaccctcgtggacatggacatggccgactactccgccgcgctggaccccgcctacaccacgctggagttcgagaacgtccaggtgctcaccatgggcaacgacaccagcccgtccgaggggaccaacctgaacgcccccaacagcctgggcgtgtccgccctctgcgccatctgcggggaccgggcgacgggcaagcactacggggccagctcctgcgacggctgcaagggcttcttccgccgggcggtccgcaagaaccacatgtacgcctgccggttcgcccgccagtgcgtggtggaccgcgaccggcggaaccagtgccgctactgccggctgaagaagtgcttccgcgccgggatgcgccgggaggccgtccagaacgagcgggaccgcatctccacccggcgcgccgcctacgaggacagcgccctgcccagcatcaacgcgctcctgcaggccgaggtgctgtcccggcagatcgccgcgcccgtgtccggcatcaacggggacatccgcgccaagaagatcgccagcatcgccgacgtctgcgagagcatgaaggagcagctcctggtgctggtggagtgggcgaagtacatcccggccttctgcgagctccccctggacgaccaggtcgccctgctccgggcccacgccggcgagcacctcctgctgggggcgaccaagcgctccatggtgttcaaggacgtgctgctgctcggcaacgactacatcgtcccccggcactgccccgagctggccgagatgagccgcgtgtccatccggatcctggacgagctcgtgctgccgttccaggagctgcagatcgacgacaacgagtacgcctacctcaaggccatcatcttcttcgaccccgacgccaagggcctgagcgaccccgggaagatcaagcgcctgcgcgcccaggtccaggtgagcctcgaggactacatcaacgaccggcagtacgactcccgcggccggttcggggagctgctgctcctgctgcccacgctccagagcatcacctggcagatgatcgagcagatccagttcatcaagctgttcggcatggcgaagatcgacaacctgctccaggagatgctgctgggcggggccccgagcgacgcgccccacgcccaccaccccctccacccccacctgatgcaggagcacatgggcaccaacgtgatcgtcgccaacaccatgccgacgcacctgtccaacgggcagatgtgcgagtggccccgcccccggggccaggccgccgcccccgaggccccgcagcccgcgccgcccgggggctccggcagcgagccctacaagctgctccccggggccgtggccaccatcgtgcggcccctggaggccatcccccagccgacgatcaccaagcaggaggtcatcgcctatccttatgatgttcctgattatgcagcctacccctacgacgtgccggactacgccgcctacccctatgacgtgcctgattacgccgcgtgaggactagtccctgttcccagagcccacttttttttctttttttgaaataaaatagcctgtctttcagatctcaaaggctcttttcagagccaccaaaaaaaaaaaaaaaaaaaaaaaaaaaaaaaaaaaaaaaaaaaaaaaaaaaaaaaaaaaaaaaaaaaaaaaaaaaaaaaaaaaaaaaaaaaaaaaaaaaaa

SEQ ID NO: 5611 - RNA, 1790 nt, synthetic construct
  misc_feature 1..1790: note = mRNA a-1 (hSL-A100) (opt1) from Homo sapiens__NP_000448.3__HNF4A(1-474)(S87A_K106R_K108R_K126R_K 127R_S138A_T139A_S142A_S143A_S148A_T166A_S167A_S313A_S378A_ T429A_T432A_S436A_K458R_S461E)_HA-tag R10322
  source 1..1790: mol_type = other RNA
aggagagtcccgcagtcggcgtccagcggctctgcttgttcgtgtgtgtgtcgttgcaggccttattcaagcttaccatgcgcctgagcaagaccctcgtggacatggacatggccgactactccgccgcgctggaccccgcctacaccacgctggagttcgagaacgtccaggtgctcaccatgggcaacgacaccagcccgtccgaggggaccaacctgaacgcccccaacagcctgggcgtgtccgccctctgcgccatctgcggggaccgggcgacgggcaagcactacggggccagctcctgcgacggctgcaagggcttcttccgccgggcggtccgcaagaaccacatgtactcctgccggttcagccgccagtgcgtggtggaccgcgaccggcggaaccagtgccgctactgccggctgaagaagtgcttccgcgccgggatgcgccgggaggccgtccagaacgagcgggaccgcatcgccgcccggcgcgccgcctacgaggacagcgccctgcccagcatcaacgcgctcctgcaggccgaggtgctgtcccggcagatcgccgcgcccgtgtccggcatcaacggggacatccgcgccaagaagatcgccagcatcgccgacgtctgcgagagcatgaaggagcagctcctggtgctggtggagtgggcgaagtacatcccggccttctgcgagctccccctggacgaccaggtcgccctgctccgggcccacgccggcgagcacctcctgctgggggcgaccaagcgctccatggtgttcaaggacgtgctgctgctcggcaacgactacatcgtcccccggcactgccccgagctggccgagatgagccgcgtgtccatccggatcctggacgagctcgtgctgccgttccaggagctgcagatcgacgacaacgagtacgcctacctcaaggccatcatcttcttcgaccccgacgccaagggcctgagcgaccccgggaagatcaagcgcctgcgcgcccaggtccaggtgagcctcgaggactacatcaacgaccggcagtacgactcccgcggccggttcggggagctgctgctcctgctgcccacgctccagagcatcacctggcagatgatcgagcagatccagttcatcaagctgttcggcatggcgaagatcgacaacctgctccaggagatgctgctgggcggggccccgagcgacgcgccccacgcccaccaccccctccacccccacctgatgcaggagcacatgggcaccaacgtgatcgtcgccaacaccatgccgacgcacctgtccaacgggcagatgtgcgagtggccccgcccccggggccaggccgccgcccccgaggccccgcagcccgcgccgcccgggggctccggcagcgagccctacaagctgctccccggggccgtggccaccatcgtgcggcccctggaggccatcccccagccgacgatcaccaagcaggaggtcatcgcctatccttatgatgttcctgattatgcagcctacccctacgacgtgccggactacgccgcctacccctatgacgtgcctgattacgccgcgtgaggactagtccctgttcccagagcccacttttttttctttttttgaaataaaatagcctgtctttcagatctcaaaggctcttttcagagccaccaaaaaaaaaaaaaaaaaaaaaaaaaaaaaaaaaaaaaaaaaaaaaaaaaaaaaaaaaaaaaaaaaaaaaaaaaaaaaaaaaaaaaaaaaaaaaaaaaaaaa

SEQ ID NO: 5612 - RNA, 1790 nt, synthetic construct
  misc_feature 1..1790: note = mRNA a-1 (hSL-A100) (opt1) from Homo sapiens__NP_000448.3__HNF4A(1-474)(S87A_S95A_S99A_K106R_K10 8R_K126R_K127R_S138A_T139A_S142A_S143A_S148A_T166A_S167A_S3 13A_S378A_T429A_T432A_S436A_K458R_S461E)_HA-tag R10323
  source 1..1790: mol_type = other RNA
aggagagtcccgcagtcggcgtccagcggctctgcttgttcgtgtgtgtgtcgttgcaggccttattcaagcttaccatgcgcctgagcaagaccctcgtggacatggacatggccgactactccgccgcgctggaccccgcctacaccacgctggagttcgagaacgtccaggtgctcaccatgggcaacgacaccagcccgtccgaggggaccaacctgaacgcccccaacagcctgggcgtgtccgccctctgcgccatctgcggggaccgggcgacgggcaagcactacggggccagctcctgcgacggctgcaagggcttcttccgccgggcggtccgcaagaaccacatgtacgcctgccggttcgcccgccagtgcgtggtggaccgcgaccggcggaaccagtgccgctactgccggctgaagaagtgcttccgcgccgggatgcgccgggaggccgtccagaacgagcgggaccgcatcgccgcccggcgcgccgcctacgaggacagcgccctgcccagcatcaacgcgctcctgcaggccgaggtgctgtcccggcagatcgccgcgcccgtgtccggcatcaacggggacatccgcgccaagaagatcgccagcatcgccgacgtctgcgagagcatgaaggagcagctcctggtgctggtggagtgggcgaagtacatcccggccttctgcgagctccccctggacgaccaggtcgccctgctccgggcccacgccggcgagcacctcctgctgggggcgaccaagcgctccatggtgttcaaggacgtgctgctgctcggcaacgactacatcgtcccccggcactgccccgagctggccgagatgagccgcgtgtccatccggatcctggacgagctcgtgctgccgttccaggagctgcagatcgacgacaacgagtacgcctacctcaaggccatcatcttcttcgaccccgacgccaagggcctgagcgaccccgggaagatcaagcgcctgcgcgcccaggtccaggtgagcctcgaggactacatcaacgaccggcagtacgactcccgcggccggttcggggagctgctgctcctgctgcccacgctccagagcatcacctggcagatgatcgagcagatccagttcatcaagctgttcggcatggcgaagatcgacaacctgctccaggagatgctgctgggcggggccccgagcgacgcgccccacgcccaccaccccctccacccccacctgatgcaggagcacatgggcaccaacgtgatcgtcgccaacaccatgccgacgcacctgtccaacgggcagatgtgcgagtggccccgcccccggggccaggccgccgcccccgaggccccgcagcccgcgccgcccgggggctccggcagcgagccctacaagctgctccccggggccgtggccaccatcgtgcggcccctggaggccatcccccagccgacgatcaccaagcaggaggtcatcgcctatccttatgatgttcctgattatgcagcctacccctacgacgtgccggactacgccgcctacccctatgacgtgcctgattacgccgcgtgaggactagtccctgttcccagagcccacttttttttctttttttgaaataaaatagcctgtctttcagatctcaaaggctcttttcagagccaccaaaaaaaaaaaaaaaaaaaaaaaaaaaaaaaaaaaaaaaaaaaaaaaaaaaaaaaaaaaaaaaaaaaaaaaaaaaaaaaaaaaaaaaaaaaaaaaaaaaaa

SEQ ID NO: 5613 - RNA, 1493 nt, synthetic construct
  misc_feature 1..1493: note = mRNA a-1 (hSL-A100) (opt1) from Homo sapiens__NP_000448.3__HNF4A(1-375)_HA-tag R9478
  source 1..1493: mol_type = other RNA
aggagagtcccgcagtcggcgtccagcggctctgcttgttcgtgtgtgtgtcgttgcaggccttattcaagcttaccatgcgcctgagcaagaccctcgtggacatggacatggccgactactccgccgcgctggaccccgcctacaccacgctggagttcgagaacgtccaggtgctcaccatgggcaacgacaccagcccgtccgaggggaccaacctgaacgcccccaacagcctgggcgtgtccgccctctgcgccatctgcggggaccgggcgacgggcaagcactacggggccagctcctgcgacggctgcaagggcttcttccgccggagcgtccgcaagaaccacatgtactcctgccggttcagccgccagtgcgtggtggacaaggacaagcggaaccagtgccgctactgccggctgaagaagtgcttccgcgccgggatgaagaaggaggccgtccagaacgagcgggaccgcatctccacccggcgcagctcctacgaggacagctccctgcccagcatcaacgcgctcctgcaggccgaggtgctgtcccggcagatcaccagccccgtgtccggcatcaacggggacatccgcgccaagaagatcgccagcatcgccgacgtctgcgagagcatgaaggagcagctcctggtgctggtggagtgggcgaagtacatcccggccttctgcgagctccccctggacgaccaggtcgccctgctccgggcccacgccggcgagcacctcctgctgggggcgaccaagcgctccatggtgttcaaggacgtgctgctgctcggcaacgactacatcgtcccccggcactgccccgagctggccgagatgagccgcgtgtccatccggatcctggacgagctcgtgctgccgttccaggagctgcagatcgacgacaacgagtacgcctacctcaaggccatcatcttcttcgaccccgacgccaagggcctgagcgaccccgggaagatcaagcgcctgcgctcccaggtccaggtgagcctcgaggactacatcaacgaccggcagtacgactcccgcggccggttcggggagctgctgctcctgctgcccacgctccagagcatcacctggcagatgatcgagcagatccagttcatcaagctgttcggcatggcgaagatcgacaacctgctccaggagatgctgctggcctatccttatgatgttcctgattatgcagcctacccctacgacgtgccggactacgccgcctacccctatgacgtgcctgattacgccgcgtgaggactagtccctgttcccagagcccacttttttttctttttttgaaataaaatagcctgtctttcagatctcaaaggctcttttcagagccaccaaaaaaaaaaaaaaaaaaaaaaaaaaaaaaaaaaaaaaaaaaaaaaaaaaaaaaaaaaaaaaaaaaaaaaaaaaaaaaaaaaaaaaaaaaaaaaaaaaaaa

SEQ ID NO: 5614 - RNA, 1679 nt, synthetic construct
  misc_feature 1..1679: note = mRNA a-1 (hSL-A100) (opt1) from Homo sapiens__NP_000448.3__HNF4A(39-474)_HA-tag R9479
  source 1..1679: mol_type = other RNA
aggagagtcccgcagtcggcgtccagcggctctgcttgttcgtgtgtgtgtcgttgcaggccttattcaagcttaccatggacaccagcccgtccgaggggaccaacctgaacgcccccaacagcctgggcgtgtccgccctctgcgccatctgcggggaccgggcgacgggcaagcactacggggccagctcctgcgacggctgcaagggcttcttccgccggagcgtccgcaagaaccacatgtactcctgccggttcagccgccagtgcgtggtggacaaggacaagcggaaccagtgccgctactgccggctgaagaagtgcttccgcgccgggatgaagaaggaggccgtccagaacgagcgggaccgcatctccacccggcgcagctcctacgaggacagctccctgcccagcatcaacgcgctcctgcaggccgaggtgctgtcccggcagatcaccagccccgtgtccggcatcaacggggacatccgcgccaagaagatcgccagcatcgccgacgtctgcgagagcatgaaggagcagctcctggtgctggtggagtgggcgaagtacatcccggccttctgcgagctccccctggacgaccaggtcgccctgctccgggcccacgccggcgagcacctcctgctgggggcgaccaagcgctccatggtgttcaaggacgtgctgctgctcggcaacgactacatcgtcccccggcactgccccgagctggccgagatgagccgcgtgtccatccggatcctggacgagctcgtgctgccgttccaggagctgcagatcgacgacaacgagtacgcctacctcaaggccatcatcttcttcgaccccgacgccaagggcctgagcgaccccgggaagatcaagcgcctgcgctcccaggtccaggtgagcctcgaggactacatcaacgaccggcagtacgactcccgcggccggttcggggagctgctgctcctgctgcccacgctccagagcatcacctggcagatgatcgagcagatccagttcatcaagctgttcggcatggcgaagatcgacaacctgctccaggagatgctgctgggcgggtccccgagcgacgcgccccacgcccaccaccccctccacccccacctgatgcaggagcacatgggcaccaacgtgatcgtcgccaacaccatgccgacgcacctgtccaacgggcagatgtgcgagtggccccgcccccggggccaggccgccacccccgagaccccgcagcccagcccgcccgggggctccggcagcgagccctacaagctgctccccggggccgtggccaccatcgtgaagcccctgtccgccatcccccagccgacgatcaccaagcaggaggtcatcgcctatccttatgatgttcctgattatgcagcctacccctacgacgtgccggactacgccgcctacccctatgacgtgcctgattacgccgcgtgaggactagtccctgttcccagagcccacttttttttctttttttgaaataaaatagcctgtctttcagatctcaaaggctcttttcagagccaccaaaaaaaaaaaaaaaaaaaaaaaaaaaaaaaaaaaaaaaaaaaaaaaaaaaaaaaaaaaaaaaaaaaaaaaaaaaaaaaaaaaaaaaaaaaaaaaaaaaaa

SEQ ID NO: 5615 - RNA, 1790 nt, synthetic construct
  misc_feature 1..1790: note = mRNA a-1 (hSL-A100) (opt29) from Homo sapiens__NP_000448.3__HNF4A(1-474)_HA-tag R9697
  source 1..1790: mol_type = other RNA
aggagagtcccgcagtcggcgtccagcggctctgcttgttcgtgtgtgtgtcgttgcaggccttattcaagcttaccatgagactgagcaagaccctggtggacatggacatggccgactactctgccgccctggaccctgcctacaccaccctggagttcgaaaacgtgcaagtgctgaccatgggcaacgacaccagccctagcgagggcaccaacctgaacgcccctaatagcctgggagtgtccgccctgtgtgccatctgtggcgatagagccaccggcaagcactacggcgccagctcttgtgatggctgcaagggcttcttccggcggagcgtgcggaagaaccacatgtacagctgccggttcagccggcagtgcgtggtggacaaggataagcggaaccagtgccggtactgcagactgaagaagtgcttcagagccggcatgaagaaagaagccgtgcagaacgagcgggaccggatcagcaccagaagaagcagctacgaggacagcagcctgcccagcatcaacgccctgctgcaggccgaggtgctgagcagacagatcaccagcccagtgtccggcatcaacggcgacatccgggccaagaagatcgccagcattgccgacgtgtgcgagagcatgaaggaacagctgctggtgctggtggaatgggccaagtacatccccgccttttgcgagctgcccctggacgatcaggtggccctgctgagagcacacgccggcgaacatctgctgctgggagccaccaagcggagcatggtgttcaaggacgtgctgctgctgggcaacgactacatcgtgcccagacactgccctgagctggccgagatgagccgggtgtccatcagaatcctggacgaactggtgctgccgtttcaggaactgcagatcgacgacaacgagtacgcctacctgaaggccatcatctttttcgaccccgacgccaagggcctgagcgaccctggcaagatcaagcggctgagaagccaggtgcaagtgtccctggaagattacatcaacgaccggcagtacgacagccggggcagatttggcgaactgctcctgctgctgcccaccctgcagagcatcacctggcagatgatcgagcagatccagttcatcaagctgttcggcatggccaagatcgacaatctgctgcaggaaatgctgctcgggggcagcccttctgatgcccctcatgcccaccaccctctgcaccctcacctgatgcaagaacacatgggcaccaatgtgatcgtggccaacacaatgcccacccacctgagcaacggccagatgtgcgagtggcccagacctagaggacaggccgccacacctgagacacctcagccttctccacctggcggctctggcagcgagccttacaaactgctgcctggcgctgtggccaccatcgtgaaacctctgagcgccatcccccagcccaccatcaccaagcaggaagtgatcgcctatccttatgatgttcctgattatgcagcctacccctacgacgtgccggactacgccgcctacccctatgacgtgcctgattacgccgcgtgaggactagtccctgttcccagagcccacttttttttctttttttgaaataaaatagcctgtctttcagatctcaaaggctcttttcagagccaccaaaaaaaaaaaaaaaaaaaaaaaaaaaaaaaaaaaaaaaaaaaaaaaaaaaaaaaaaaaaaaaaaaaaaaaaaaaaaaaaaaaaaaaaaaaaaaaaaaaaa

SEQ ID NO: 5616 - DNA, 20 bp, synthetic construct
  misc_feature 1..20: note = primer Mouse-Acta2 (a-SMA) forward
  source 1..20: mol_type = other DNA
gttcagtggtgcctctgtca

SEQ ID NO: 5617 - DNA, 20 bp, synthetic construct
  misc_feature 1..20: note = primer Mouse-Acta2 (a-SMA) reverse
  source 1..20: mol_type = other DNA
actgggacgacatggaaaag

SEQ ID NO: 5618 - DNA, 20 bp, synthetic construct
  misc_feature 1..20: note = primer Mouse-Col1a1 forward
  source 1..20: mol_type = other DNA
taggccattgtgtatgcagc

SEQ ID NO: 5619 - DNA, 21 bp, synthetic construct
  misc_feature 1..21: note = primer Mouse-Col1a1 reverse
  source 1..21: mol_type = other DNA
acatgttcagctttgtggacc

SEQ ID NO: 5620 - DNA, 20 bp, synthetic construct
  misc_feature 1..20: note = primer Mouse-Col1a2 forward
  source 1..20: mol_type = other DNA
aagggtgctactggactccc

SEQ ID NO: 5621 - DNA, 22 bp, synthetic construct
  misc_feature 1..22: note = primer Mouse-Col1a2 reverse
  source 1..22: mol_type = other DNA
ttgttaccggattctcctttgg

SEQ ID NO: 5622 - DNA, 20 bp, synthetic construct
  misc_feature 1..20: note = primer Mouse-Col2a1 forward
  source 1..20: mol_type = other DNA
agcaggtccttggaaacctt

SEQ ID NO: 5623 - DNA, 20 bp, synthetic construct
  misc_feature 1..20: note = primer Mouse-Col2a1 reverse
  source 1..20: mol_type = other DNA
aaggagtttcatctggccct

SEQ ID NO: 5624 - DNA, 18 bp, synthetic construct
  misc_feature 1..18: note = primer Mouse-Epcam forward
  source 1..18: mol_type = other DNA
aacacaagacgacgtgga

SEQ ID NO: 5625 - DNA, 20 bp, synthetic construct
  misc_feature 1..20: note = primer Mouse-Epcam reverse
  source 1..20: mol_type = other DNA
gctctccgttcactctcagg

SEQ ID NO: 5626 - DNA, 19 bp, synthetic construct
  misc_feature 1..19: note = primer Mouse-Gapdh forward
  source 1..19: mol_type = other DNA
tgcccccatgtttgtgatg

SEQ ID NO: 5627 - DNA, 19 bp, synthetic construct
  misc_feature 1..19: note = primer Mouse-Gapdh reverse
  source 1..19: mol_type = other DNA
tgtggtcatgagcccttcc

SEQ ID NO: 5628 - DNA, 19 bp, synthetic construct
  misc_feature 1..19: note = primer Human-A1AT forward
  source 1..19: mol_type = other DNA
tatgatgaagcgtttaggc

SEQ ID NO: 5629 - DNA, 20 bp, synthetic construct
  misc_feature 1..20: note = primer Human-A1AT reverse
  source 1..20: mol_type = other DNA
cagtaatggacagtttgggt

SEQ ID NO: 5630 - DNA, 21 bp, synthetic construct
  misc_feature 1..21: note = primer Human-AHR forward
  source 1..21: mol_type = other DNA
caaatccttccaagcggcata

SEQ ID NO: 5631 - DNA, 22 bp, synthetic construct
  misc_feature 1..22: note = primer Human-AHR reverse
  source 1..22: mol_type = other DNA
cgctgagcctaagaactgaaag

SEQ ID NO: 5632 - DNA, 22 bp, synthetic construct
  misc_feature 1..22: note = primer Human-ALB forward
  source 1..22: mol_type = other DNA
gcacagaatccttggtgaacag

SEQ ID NO: 5633 - DNA, 22 bp, synthetic construct
  misc_feature 1..22: note = primer Human-ALB reverse
  source 1..22: mol_type = other DNA
atggaaggtgaatgtttcagca

SEQ ID NO: 5634 - DNA, 19 bp, synthetic construct
  misc_feature 1..19: note = primer Human-CAR forward
  source 1..19: mol_type = other DNA
gtgctcctgtgcggagtag

SEQ ID NO: 5635 - DNA, 21 bp, synthetic construct
  misc_feature 1..21: note = primer Human-CAR reverse
  source 1..21: mol_type = other DNA
atggcagataggcagtttccc

SEQ ID NO: 5636 - DNA, 20 bp, synthetic construct
  misc_feature 1..20: note = primer Human-CYP1A2 forward
  source 1..20: mol_type = other DNA
cttcgtaaaccagtggcagg

SEQ ID NO: 5637 - DNA, 20 bp, synthetic construct
  misc_feature 1..20: note = primer Human-CYP1A2 reverse
  source 1..20: mol_type = other DNA
agggcttgttaatggcagtg

SEQ ID NO: 5638 - DNA, 21 bp, synthetic construct
  misc_feature 1..21: note = primer Human-CYP2B6 forward
  source 1..21: mol_type = other DNA
ccggggatatggtgtgatctt

SEQ ID NO: 5639 - DNA, 21 bp, synthetic construct
  misc_feature 1..21: note = primer Human-CYP2B6 reverse
  source 1..21: mol_type = other DNA
ccgaagtccctcatagtggtc

SEQ ID NO: 5640 - DNA, 21 bp, synthetic construct
  misc_feature 1..21: note = primer Human-CYP2C19 forward
  source 1..21: mol_type = other DNA
gaagaggagcattgaggaccg

SEQ ID NO: 5641 - DNA, 20 bp, synthetic construct
  misc_feature 1..20: note = primer Human-CYP2C19 reverse
  source 1..20: mol_type = other DNA
gcccaggatgaaagtgggat

SEQ ID NO: 5642 - DNA, 21 bp, synthetic construct
  misc_feature 1..21: note = primer Human-CYP2C9 forward
  source 1..21: mol_type = other DNA
gccacatgccctacacagatg

SEQ ID NO: 5643 - DNA, 23 bp, synthetic construct
  misc_feature 1..23: note = primer Human-CYP2C9 reverse
  source 1..23: mol_type = other DNA
taatgtcacaggtcactgcatgg

SEQ ID NO: 5644 - DNA, 20 bp, synthetic construct
  misc_feature 1..20: note = primer Human-CYP3A4 forward
  source 1..20: mol_type = other DNA
agcctggtgctcctctatct

SEQ ID NO: 5645 - DNA, 20 bp, synthetic construct
  misc_feature 1..20: note = primer Human-CYP3A4 reverse
  source 1..20: mol_type = other DNA
cccttatggtaggacaaaat

SEQ ID NO: 5646 - DNA, 22 bp, synthetic construct
  misc_feature 1..22: note = primer Human-FXR forward
  source 1..22: mol_type = other DNA
aaccatactcgcaatacagcaa

SEQ ID NO: 5647 - DNA, 21 bp, synthetic construct
  misc_feature 1..21: note = primer Human-FXR reverse
  source 1..21: mol_type = other DNA
acagctcatcccctttgatcc

SEQ ID NO: 5648 - DNA, 21 bp, synthetic construct
  misc_feature 1..21: note = primer Human-GAPDH forward
  source 1..21: mol_type = other DNA
tcttccaggagcgagatccct

SEQ ID NO: 5649 - DNA, 22 bp, synthetic construct
  misc_feature 1..22: note = primer Human-GAPDH reverse
  source 1..22: mol_type = other DNA
tggtcatgagtccttccacgat

SEQ ID NO: 5650 - DNA, 20 bp, synthetic construct
  misc_feature 1..20: note = primer Human-HNF4A forward (exogenous)
  source 1..20: mol_type = other DNA
cgtggacaagaacagcaacg

SEQ ID NO: 5651 - DNA, 19 bp, synthetic construct
  misc_feature 1..19: note = primer Human-HNF4A reverse (exogenous)
  source 1..19: mol_type = other DNA
ggtcgttgtcggaggtcag

SEQ ID NO: 5652 - DNA, 19 bp, synthetic construct
  misc_feature 1..19: note = primer Human-PXR forward
  source 1..19: mol_type = other DNA
aagcccagtgtcaacgcag

SEQ ID NO: 5653 - DNA, 19 bp, synthetic construct
  misc_feature 1..19: note = primer Human-PXR reverse
  source 1..19: mol_type = other DNA
gggtcttccgggtgatctc

SEQ ID NO: 5654 - DNA, 22 bp, synthetic construct
  misc_feature 1..22: note = primer Human-RXRA forward
  source 1..22: mol_type = other DNA
atggacaccaaacatttcctgc

SEQ ID NO: 5655 - DNA, 21 bp, synthetic construct
  misc_feature 1..21: note = primer Human-RXRA reverse
  source 1..21: mol_type = other DNA
gggagctgatgaccgagaaag

SEQ ID NO: 5656 - DNA, 19 bp, synthetic construct
  misc_feature 1..19: note = primer Human-RXRB forward
  source 1..19: mol_type = other DNA
gcagcccaaatgaccctgt

SEQ ID NO: 5657 - DNA, 20 bp, synthetic construct
  misc_feature 1..20: note = primer Human-RXRB reverse
  source 1..20: mol_type = other DNA
cccgcagcaatatgacctga

SEQ ID NO: 5658 - DNA, 19 bp, synthetic construct
  misc_feature 1..19: note = primer Human-SLC10A1 forward
  source 1..19: mol_type = other DNA
agggggacatgaacctcag

SEQ ID NO: 5659 - DNA, 20 bp, synthetic construct
  misc_feature 1..20: note = primer Human-SLC10A1 reverse
  source 1..20: mol_type = other DNA
aggtccccatcatagatccc

SEQ ID NO: 5660 - DNA, 20 bp, synthetic construct
  misc_feature 1..20: note = primer Human-SLCO1B3 forward
  source 1..20: mol_type = other DNA
gaaaacaagacgctgcaatg

SEQ ID NO: 5661 - DNA, 24 bp, synthetic construct
  misc_feature 1..24: note = primer Human-SLCO1B3 reverse
  source 1..24: mol_type = other DNA
tcctttctatttgagtgatggaaa

SEQ ID NO: 5662 - DNA, 20 bp, synthetic construct
  misc_feature 1..20: note = primer Human-TF forward
  source 1..20: mol_type = other DNA
tgtctacatagcgggcaagt

SEQ ID NO: 5663 - DNA, 18 bp, synthetic construct
  misc_feature 1..18: note = primer Human-TF reverse
  source 1..18: mol_type = other DNA
gttccagccagcggttct

SEQ ID NO: 5664 - DNA, 19 bp, synthetic construct
  misc_feature 1..19: note = primer Human-TTR forward
  source 1..19: mol_type = other DNA
tgggagccatttgcctctg

SEQ ID NO: 5665 - DNA, 21 bp, synthetic construct
  misc_feature 1..21: note = primer Human-TTR reverse
  source 1..21: mol_type = other DNA
agccgtggtggaataggagta

SEQ ID NO: 5666 - DNA, 20 bp, synthetic construct
  misc_feature 1..20: note = primer Human-UGT1A1 forward
  source 1..20: mol_type = other DNA
ccatcatgcccaatatggtt

SEQ ID NO: 5667 - DNA, 20 bp, synthetic construct
  misc_feature 1..20: note = primer Human-UGT1A1 reverse
  source 1..20: mol_type = other DNA
ccacaattccatgttctcca

SEQ ID NO: 5668 - DNA, 20 bp, synthetic construct
  misc_feature 1..20: note = primer Human-UGT2B15 forward
  source 1..20: mol_type = other DNA
gttttctctggggtcgatga

SEQ ID NO: 5669 - DNA, 20 bp, synthetic construct
  misc_feature 1..20: note = primer Human-UGT2B15 reverse
  source 1..20: mol_type = other DNA
atttggcttcttgccatcaa

SEQ ID NO: 5670 - DNA, 20 bp, synthetic construct
  misc_feature 1..20: note = primer Human-UGT2B7 forward
  source 1..20: mol_type = other DNA
aacgtaattgcatcagccct

SEQ ID NO: 5671 - DNA, 20 bp, synthetic construct
  misc_feature 1..20: note = primer Human-UGT2B7 reverse
  source 1..20: mol_type = other DNA
ggtcattctggggtatccac

SEQ ID NO: 5672 - protein, 631 aa, Homo sapiens
  REGION 1..631: note = protein (wt) from Homo sapiens__NP_000536.6__HNF1A(1-631)
MVSKLSQLQTELLAALLESGLSKEALIQALGEPGPYLLAGEGPLDKGESCGGGRGELAELPNGLGETRGSEDETDDDGEDFTPPILKELENLSPEEAAHQKAVVETLLQEDPWRVAKMVKSYLQQHNIPQREVVDTTGLNQSHLSQHLNKGTPMKTQKRAALYTWYVRKQREVAQQFTHAGQGGLIEEPTGDELPTKKGRRNRFKWGPASQQILFQAYERQKNPSKEERETLVEECNRAECIQRGVSPSQAQGLGSNLVTEVRVYNWFANRRKEEAFRHKLAMDTYSGPPPGPGPGPALPAHSSPGLPPPALSPSKVHGVRYGQPATSETAEVPSSSGGPLVTVSTPLHQVSPTGLEPSHSLLSTEAKLVSAAGGPLPPVSTLTALHSLEQTSPGLNQQPQNLIMASLPGVMTIGPGEPASLGPTFTNTGASTLVIGLASTQAQSVPVINSMGSSLTTLQPVQFSQPLHPSYQQPLMPPVQSHVTQSPFMATMAQLQSPHALYSHKPEVAQYTHTGLLPQTMLITDTTNLSALASLTPTKQVFTSDTEASSESGLHTPASQATTLHVPSQDPASIQHLQPAHRLSASPTVSSSSLVLYQSSDSSNGQSHLLPSNHSVIETFISTQMASSSQ

SEQ ID NO: 5673 - RNA, 1896 nt, Homo sapiens
  misc_feature 1..1896: note = CDS (wt) from Homo sapiens__NP_000536.6__HNF1A(1-631)
  source 1..1896: mol_type = mRNA
atggtttctaaactgagccagctgcagacggagctcctggcggccctgctcgagtcagggctgagcaaagaggcactgatccaggcactgggtgagccggggccctacctcctggctggagaaggccccctggacaagggggagtcctgcggcggcggtcgaggggagctggctgagctgcccaatgggctgggggagactcggggctccgaggacgagacggacgacgatggggaagacttcacgccacccatcctcaaagagctggagaacctcagccctgaggaggcggcccaccagaaagccgtggtggagacccttctgcaggaggacccgtggcgtgtggcgaagatggtcaagtcctacctgcagcagcacaacatcccacagcgggaggtggtcgataccactggcctcaaccagtcccacctgtcccaacacctcaacaagggcactcccatgaagacgcagaagcgggccgccctgtacacctggtacgtccgcaagcagcgagaggtggcgcagcagttcacccatgcagggcagggagggctgattgaagagcccacaggtgatgagctaccaaccaagaaggggcggaggaaccgtttcaagtggggcccagcatcccagcagatcctgttccaggcctatgagaggcagaagaaccctagcaaggaggagcgagagacgctagtggaggagtgcaatagggcggaatgcatccagagaggggtgtccccatcacaggcacaggggctgggctccaacctcgtcacggaggtgcgtgtctacaactggtttgccaaccggcgcaaagaagaagccttccggcacaagctggccatggacacgtacagcgggccccccccagggccaggcccgggacctgcgctgcccgctcacagctcccctggcctgcctccacctgccctctcccccagtaaggtccacggtgtgcgctatggacagcctgcgaccagtgagactgcagaagtaccctcaagcagcggcggtcccttagtgacagtgtctacacccctccaccaagtgtcccccacgggcctggagcccagccacagcctgctgagtacagaagccaagctggtctcagcagctgggggccccctcccccctgtcagcaccctgacagcactgcacagcttggagcagacatccccaggcctcaaccagcagccccagaacctcatcatggcctcacttcctggggtcatgaccatcgggcctggtgagcctgcctccctgggtcctacgttcaccaacacaggtgcctccaccctggtcatcggcctggcctccacgcaggcacagagtgtgccggtcatcaacagcatgggcagcagcctgaccaccctgcagcccgtccagttctcccagccgctgcacccctcctaccagcagccgctcatgccacctgtgcagagccatgtgacccagagccccttcatggccaccatggctcagctgcagagcccccacgccctctacagccacaagcccgaggtggcccagtacacccacacgggcctgctcccgcagactatgctcatcaccgacaccaccaacctgagcgccctggccagcctcacgcccaccaagcaggtcttcacctcagacactgaggcctccagtgagtccgggcttcacacgccggcatctcaggccaccaccctccacgtccccagccaggaccctgccagcatccagcacctgcagccggcccaccggctcagcgccagccccacagtgtcctccagcagcctggtgctgtaccagagctcagactccagcaatggccagagccacctgctgccatccaaccacagcgtcatcgagaccttcatctccacccagatggcctcttcctcccagtaa

SEQ ID NO: 5674 - RNA, 1896 nt, synthetic construct
  misc_feature 1..1896: note = CDS (wt mod) from Homo sapiens__NP_000536.6__HNF1A(1-631)
  source 1..1896: mol_type = other RNA
atggtttctaaactgagccagctgcagacggagctcctggcggccctgctcgagtcagggctgagcaaagaggcactgatccaggcactgggtgagccggggccctacctcctggctggagaaggccccctggacaagggggagtcctgcggcggcggtcgaggggagctggctgagctgcccaatgggctgggggagactcggggctccgaggacgagacggacgacgatggggaagacttcacgccacccatcctcaaagagctggagaacctcagccctgaggaggcggcccaccagaaagccgtggtggagacccttctgcaggaggacccgtggcgtgtggcgaagatggtcaagtcctacctgcagcagcacaacatcccacagcgggaggtggtcgataccactggcctcaaccagtcccacctgtcccaacacctcaacaagggcactcccatgaagacgcagaagcgggccgccctgtacacctggtacgtccgcaagcagcgagaggtggcgcagcagttcacccacgcagggcagggagggctgattgaggaacccacaggtgatgagctaccaaccaagaaggggcggaggaaccgtttcaagtggggcccagcatcccagcagatcctgttccaggcctatgagaggcagaagaaccctagcaaggaggagcgagagacgctagtggaggagtgcaatagggcggaatgcatccagagaggggtgtccccatcacaggcacaggggctgggctccaacctcgtcacggaggtgcgtgtctacaactggtttgccaaccggcgcaaagaagaagccttccggcacaagctggccatggacacgtacagcgggccacccccagggccaggcccgggacctgcgctgcccgctcacagctcccctggcctgcctccccctgccctctcccccagtaaggtccacggtgtgcgctatggacagcctgcgaccagtgagactgcagaagtaccctcaagcagcggcggtcccttagtgacagtgtctacacccctccaccaagtgtcccccacgggcctggagcccagccacagcctgctgagtacagaagccaagctggtctcagcagctgggggccccctgccccctgtcagcaccctgacagcactgcacagcttggagcagacatccccaggcctcaaccagcagccccagaacctcatcatggcctcacttcctggggtcatgaccatcgggcctggtgagcctgcctccctgggtcctacgttcaccaacacaggtgcctccaccctggtcatcggcctggcctccacgcaggcacagagtgtgccggtcatcaacagcatgggcagcagcctgaccaccctgcagcccgtccagttctcccagccgctgcacccctcctaccagcagccgctcatgccacctgtgcagagccatgtgacccagagccccttcatggccaccatggctcagctgcagagcccccacgccctctacagccacaagcccgaggtggcccagtacacccacacgggcctgctcccgcagactatgctcatcaccgacaccaccaacctgagcgccctggccagcctcacgcccaccaagcaggtcttcacctcagacactgaggcctccagtgagtccgggcttcacacgccggcatctcaggccaccaccctccacgtccccagccaggaccctgccagcatccagcacctccagccggcccaccggctcagcgccagccccacagtgtcctccagcagcctggtgctgtaccagagctcagactccagcaatggccagagccatctgctgccatccaaccacagcgtcatcgagaccttcatctccacccagatggcctcttcctcccagtga

SEQ ID NO: 5675 - RNA, 1896 nt, synthetic construct
  misc_feature 1..1896: note = CDS (opt1) from Homo sapiens__NP_000536.6__HNF1A(1-631)
  source 1..1896: mol_type = other RNA
atggtgagcaagctgtcccagctgcagaccgagctgctggccgccctcctggagagcggcctgtccaaggaggcgctcatccaggccctgggggagcccggcccgtacctgctcgccggggagggccccctggacaagggggagagctgcggcggcgggcgcggcgagctggccgagctccccaacgggctgggcgagacccgggggtccgaggacgagacggacgacgacggcgaggacttcacgcccccgatcctgaaggagctcgagaacctgagccccgaggaggccgcgcaccagaaggccgtcgtggagaccctgctccaggaggacccctggcgcgtggccaagatggtcaagtcctacctgcagcagcacaacatcccccagcgggaggtggtggacaccaccggcctgaaccagagccacctctcccagcacctgaacaaggggaccccgatgaagacccagaagcgcgccgcgctgtacacctggtacgtccggaagcagcgcgaggtggcccagcagttcacgcacgccggccagggcggcctcatcgaggagcccaccggcgacgagctgcccaccaagaaggggcggcgcaaccggttcaagtggggccccgccagccagcagatcctgttccaggcctacgagcgccagaagaacccgtccaaggaggagcgggagaccctcgtggaggagtgcaaccgcgcggagtgcatccagcgcggggtcagcccctcccaggcccagggcctggggagcaacctggtgacggaggtgcgggtctacaactggttcgccaaccggcgcaaggaggaggccttccggcacaagctcgccatggacacctactccgggcccccgcccggccccgggcccggccccgcgctgccggcccacagctcccccgggctgcccccgcccgccctcagcccctccaaggtgcacggcgtgcgctacgggcagcccgccaccagcgagaccgccgaggtccccagctccagcggcggcccgctggtgacggtgtccacgcccctgcaccaggtcagccccaccgggctcgagccgtcccacagcctgctgtccaccgaggcgaagctcgtgagcgccgccggcgggcccctgccgcccgtgtccaccctgaccgccctccacagcctggagcagacctcccccggcctgaaccagcagccccagaacctcatcatggccagcctgcccggggtcatgaccatcggccccggcgagccggcgtccctggggcccacgttcaccaacaccggcgccagcaccctggtgatcgggctcgcctccacgcaggcccagagcgtgcccgtcatcaactccatgggcagctccctgaccaccctgcagcccgtgcagttcagccagccgctccaccccagctaccagcagcccctgatgcccccggtccagtcccacgtgacccagagccccttcatggcgacgatggcccagctgcagagcccccacgccctctactcccacaagcccgaggtggcccagtacacccacaccggcctgctgccgcagaccatgctcatcacggacaccaccaacctgtccgccctggcgagcctcacccccaccaagcaggtcttcacgtccgacaccgaggccagctccgagagcgggctgcacacccccgcctcccaggccaccacgctgcacgtgcccagccaggacccggcctccatccagcacctccagcccgcgcaccggctgagcgcctcccccaccgtgagctccagcagcctggtcctctaccagtccagcgactccagcaacggccagtcccacctcctgccgagcaaccactccgtgatcgagaccttcatcagcacccagatggcctccagctcccagtga

SEQ ID NO: 5676 - RNA, 1896 nt, synthetic construct
  misc_feature 1..1896: note = CDS (opt2) from Homo sapiens__NP_000536.6__HNF1A(1-631)
  source 1..1896: mol_type = other RNA
atggtctccaagctctcccagctccagaccgagctcctcgccgccctcctcgagtccggcctctccaaggaggccctcatccaggccctcggcgagcccggcccctacctcctcgccggcgagggccccctcgacaagggcgagtcctgcggcggcggccgcggcgagctcgccgagctccccaacggcctcggcgagacccgcggctccgaggacgagaccgacgacgacggcgaggacttcaccccccccatcctcaaggagctcgagaacctctcccccgaggaggccgcccaccagaaggccgtcgtcgagaccctcctccaggaggacccctggcgcgtcgccaagatggtcaagtcctacctccagcagcacaacatcccccagcgcgaggtcgtcgacaccaccggcctcaaccagtcccacctctcccagcacctcaacaagggcacccccatgaagacccagaagcgcgccgccctctacacctggtacgtccgcaagcagcgcgaggtcgcccagcagttcacccacgccggccagggcggcctcatcgaggagcccaccggcgacgagctccccaccaagaagggccgccgcaaccgcttcaagtggggccccgcctcccagcagatcctcttccaggcctacgagcgccagaagaacccctccaaggaggagcgcgagaccctcgtcgaggagtgcaaccgcgccgagtgcatccagcgcggcgtctccccctcccaggcccagggcctcggctccaacctcgtcaccgaggtccgcgtctacaactggttcgccaaccgccgcaaggaggaggccttccgccacaagctcgccatggacacctactccggccccccccccggccccggccccggccccgccctccccgcccactcctcccccggcctccccccccccgccctctccccctccaaggtccacggcgtccgctacggccagcccgccacctccgagaccgccgaggtcccctcctcctccggcggccccctcgtcaccgtctccacccccctccaccaggtctcccccaccggcctcgagccctcccactccctcctctccaccgaggccaagctcgtctccgccgccggcggccccctcccccccgtctccaccctcaccgccctccactccctcgagcagacctcccccggcctcaaccagcagccccagaacctcatcatggcctccctccccggcgtcatgaccatcggccccggcgagcccgcctccctcggccccaccttcaccaacaccggcgcctccaccctcgtcatcggcctcgcctccacccaggcccagtccgtccccgtcatcaactccatgggctcctccctcaccaccctccagcccgtccagttctcccagcccctccacccctcctaccagcagcccctcatgccccccgtccagtcccacgtcacccagtcccccttcatggccaccatggcccagctccagtccccccacgccctctactcccacaagcccgaggtcgcccagtacacccacaccggcctcctcccccagaccatgctcatcaccgacaccaccaacctctccgccctcgcctccctcacccccaccaagcaggtcttcacctccgacaccgaggcctcctccgagtccggcctccacacccccgcctcccaggccaccaccctccacgtcccctcccaggaccccgcctccatccagcacctccagcccgcccaccgcctctccgcctcccccaccgtctcctcctcctccctcgtcctctaccagtcctccgactcctccaacggccagtcccacctcctcccctccaaccactccgtcatcgagaccttcatctccacccagatggcctcctcctcccagtga

SEQ ID NO: 5677 - RNA, 1896 nt, synthetic construct
  misc_feature 1..1896: note = CDS (opt3) from Homo sapiens__NP_000536.6__HNF1A(1-631)
  source 1..1896: mol_type = other RNA
atggtgagcaagctgtcccagctccaaaccgagcttctggccgctttgttagaatctggcctgtcaaaagaggcactaatccaggccctcggggaacccggaccttacctgcttgcgggtgagggcccactggacaagggggaaagttgcggaggcggtagaggggagttggctgagctcccgaacggactgggcgaaacaaggggcagcgaggatgaaactgacgatgacggggaggatttcacgccccctattctgaaagagctcgaaaatttatccccagaggaagccgcacaccagaaggccgtcgttgagaccctgcttcaggaagacccctggcgggtggctaaaatggtaaagtcttatttgcaacagcataacatacctcagcgcgaggtggtcgatacaactggactgaatcagtcgcacctatcacaacatctcaacaagggtaccccaatgaaaacacagaagcgagcagccctgtacacctggtatgtgcgtaaacagagagaggttgctcagcaatttactcacgccggccaagggggacttatcgaggaacccacaggcgacgaactgcctaccaagaaaggtaggcggaatcgcttcaagtgggggccagcgagccagcagattttgtttcaggcatacgagagacagaagaacccgagtaaagaagagagggagacgctcgtggaagagtgtaatcgggccgaatgcatccagcgcggagtctccccctctcaagctcagggcctgggcagcaacttagtgactgaggtacgagtttataattggttcgccaacagaaggaaggaagaggcatttcggcataaactggctatggatacctactccgggcctccacccggacctggtccaggccccgccctcccggcgcactcaagtcctgggcttccccctccagccctgagcccctctaaggtgcacggagtccgttatggccagccagcaacatccgagactgctgaagtgccctcaagcagtggtgggcctttggtgaccgtctctacaccactacatcaggtttccccgaccggcctggagcccagccactcgctcctgtctacggaagccaaacttgtgtccgctgccggaggccctctgccacccgtatcaactttgacagcactccatagtctggagcaaaccagccctgggttaaatcagcagccacagaacctgattatggcctccctacccggagtgatgactatcggtccgggcgagcctgcttctctcgggccaacattcaccaatacgggagcgagcaccctggtcataggccttgcatcaacacaagcccagagtgtgcccgttatcaactccatgggtagctctttgactaccctgcagcctgtgcagttttcacaacccctccacccaagttaccagcagcctctgatgcccccagtccaaagccacgtgacacagtccccgttcatggctactatggcccagcttcagtctcctcatgcactgtactcgcacaagcccgaagtagcccaatatacccatacagggttgctcccacagaccatgctgattactgacacgacaaatttaagcgctctggcctccctaacccccactaaacaggtttttacctcagatacagaggcaagttctgaaagcggcctccacacccctgcgtcccaggctactacactgcatgtgccatcacaagaccccgccagcatccagcaccttcagcctgcacaccgcttgtctgcctccccgacggtcagttctagctccctggtgctctaccagtcaagtgatagctcgaacggacaatcccatctgttaccatctaaccacagcgtcattgagaccttcatctcaactcagatggctagttcctctcagtga

SEQ ID NO: 5678 - RNA, 1896 nt, synthetic construct
  misc_feature 1..1896: note = CDS (opt4) from Homo sapiens__NP_000536.6__HNF1A(1-631)
  source 1..1896: mol_type = other RNA
atggtgagcaagctgagccagctgcagaccgagctgctggccgccctgctggagagcggcctgagcaaggaggccctgatccaggccctgggcgagcccggcccctacctgctggccggcgagggccccctggacaagggcgagagctgcggcggcggcagaggcgagctggccgagctgcccaacggcctgggcgagaccagaggcagcgaggacgagaccgacgacgacggcgaggacttcaccccccccatcctgaaggagctggagaacctgagccccgaggaggccgcccaccagaaggccgtggtggagaccctgctgcaggaggacccctggagagtggccaagatggtgaagagctacctgcagcagcacaacatcccccagagagaggtggtggacaccaccggcctgaaccagagccacctgagccagcacctgaacaagggcacccccatgaagacccagaagagagccgccctgtacacctggtacgtgagaaagcagagagaggtggcccagcagttcacccacgccggccagggcggcctgatcgaggagcccaccggcgacgagctgcccaccaagaagggcagaagaaacagattcaagtggggccccgccagccagcagatcctgttccaggcctacgagagacagaagaaccccagcaaggaggagagagagaccctggtggaggagtgcaacagagccgagtgcatccagagaggcgtgagccccagccaggcccagggcctgggcagcaacctggtgaccgaggtgagagtgtacaactggttcgccaacagaagaaaggaggaggccttcagacacaagctggccatggacacctacagcggccccccccccggccccggccccggccccgccctgcccgcccacagcagccccggcctgcccccccccgccctgagccccagcaaggtgcacggcgtgagatacggccagcccgccaccagcgagaccgccgaggtgcccagcagcagcggcggccccctggtgaccgtgagcacccccctgcaccaggtgagccccaccggcctggagcccagccacagcctgctgagcaccgaggccaagctggtgagcgccgccggcggccccctgccccccgtgagcaccctgaccgccctgcacagcctggagcagaccagccccggcctgaaccagcagccccagaacctgatcatggccagcctgcccggcgtgatgaccatcggccccggcgagcccgccagcctgggccccaccttcaccaacaccggcgccagcaccctggtgatcggcctggccagcacccaggcccagagcgtgcccgtgatcaacagcatgggcagcagcctgaccaccctgcagcccgtgcagttcagccagcccctgcaccccagctaccagcagcccctgatgccccccgtgcagagccacgtgacccagagccccttcatggccaccatggcccagctgcagagcccccacgccctgtacagccacaagcccgaggtggcccagtacacccacaccggcctgctgccccagaccatgctgatcaccgacaccaccaacctgagcgccctggccagcctgacccccaccaagcaggtgttcaccagcgacaccgaggccagcagcgagagcggcctgcacacccccgccagccaggccaccaccctgcacgtgcccagccaggaccccgccagcatccagcacctgcagcccgcccacagactgagcgccagccccaccgtgagcagcagcagcctggtgctgtaccagagcagcgacagcagcaacggccagagccacctgctgcccagcaaccacagcgtgatcgagaccttcatcagcacccagatggccagcagcagccagtga

SEQ ID NO: 5679 - RNA, 1896 nt, synthetic construct
  misc_feature 1..1896: note = CDS (opt5) from Homo sapiens__NP_000536.6__HNF1A(1-631)
  source 1..1896: mol_type = other RNA
atggtgagcaagctgtcccagctccaaaccgagctgcttgccgctctgctcgaatctggcctgagcaaagaggcccttatccaggcgctgggggaacccggaccttacctcctggctggcgaggggccgctggacaagggagaatcctgcggcgggggaagaggcgagctcgccgagctgcccaacggccttggggaaacacggggatctgaggatgaaacggacgatgacggcgaggatttcacccctcccattctgaaagagctcgaaaatctgagccctgaggaagccgctcaccagaaggccgtcgttgagacacttctgcaggaagacccctggcgcgtggctaaaatggtgaagtcctatctccaacagcataacatccctcagagagaggtcgtggataccacagggctgaatcagtctcacctgagccaacatctcaacaagggaaccccgatgaaaacacagaagcgggccgcgctgtacacctggtatgttcgcaaacagagagaggtggcccagcaatttacgcacgctggccaagggggacttattgaagaacccaccggcgacgaactgcctacaaagaaaggccggcgcaatagattcaagtgggggcccgcctcccagcagatcctctttcaggcttacgagcggcagaagaaccctagcaaagaggagcgcgagaccctggtcgaagagtgtaatagagccgaatgcattcagcggggagtgtctccctcccaagcgcagggccttgggagcaacctggttacagaggtgcgcgtctataattggttcgccaacagacggaaggaagaggcttttcgccataaactcgccatggatacctactctggaccgcctcccggccctgggcccggacccgctctgcctgcccactccagcccgggcctgccccctcccgccctctctccttccaaggtgcacggcgtgagatatgggcagcccgctacgagcgagacagcggaagtcccgtcctctagcggaggccctctggttaccgtgtccacaccccttcatcaggtgagccctaccgggctggagccctctcactccctcctgagcaccgaagccaaacttgtctctgctgccggaggccctctgcccccggtgagcacactcacggccctgcattccctggagcaaacctctcctgggctcaatcagcagccccagaacctgatcatggctagccttcccggcgttatgacaatcggacctggcgagccggcctccctggggcccaccttcacaaataccggagcgagcacgctcgtgattggcctggcttctacacaagcccagtccgtccctgtgatcaacagcatggggtcttccctgaccacccttcagcccgttcagtttagccaacctctccacccctcctaccagcagcctctgatgcccccggtgcaatctcacgtcacacagagccctttcatggccaccatggctcagctgcagagcccccatgccctctactctcacaagcctgaagtggctcaatatacacatacgggactgcttccccagaccatgctgattacagacaccacaaatctcagcgccctggcgtccctgaccccgacgaaacaggtctttaccagcgatacagaggcctcttccgaaagcggccttcacacccctgcttctcaggccacaaccctccatgtgccctcccaagaccctgctagcatccagcatctgcagcccgcccaccggctgtctgcgagccccacggtttcctcctcttccctcgtgctgtaccagagctccgattctagcaacgggcaatcccaccttctgccttctaaccacagcgtcattgagacattcatctccacccagatggcctctagctcccagtga

SEQ ID NO: 5680 - RNA, 1896 nt, synthetic construct
  misc_feature 1..1896: note = CDS (opt11) from Homo sapiens__NP_000536.6__HNF1A(1-631)
  source 1..1896: mol_type = other RNA
atggtatccaaactctcccaactccaaaccgaacttctcgcagcccttctagagagcggcctttccaaagaagccctgatacaagcactcggagaacccggcccatacctcctcgccggcgagggccctttagacaaaggtgaatcctgcggtggtggtcgtggagaactagctgaactaccgaacggcttaggcgaaacccgaggctccgaagatgaaaccgacgacgatggtgaggacttcacacccccaatactaaaagaactagaaaacctctcacccgaagaagccgctcaccaaaaagccgttgtagaaaccctactccaagaagacccctggcgagtagcgaaaatggtaaaatcatacctccaacaacacaacatcccccaacgcgaagtcgtcgacacaaccggcctaaaccaatcccacctctcccaacacctcaacaaaggcacaccaatgaaaacacaaaaacgcgcagccctctacacatggtacgtacgaaaacaacgcgaagtcgcccaacaattcacacacgccggacaaggaggactaatcgaagaacccaccggcgacgaactacctacaaagaaaggccgccgaaaccgtttcaaatggggccccgcctcacaacaaatcctattccaagcctacgaacgccagaaaaaccccagcaaagaagaacgagaaaccctcgtcgaagaatgcaatcgcgcggagtgcattcaacgaggcgtctctccctcccaagcccaaggacttggctccaacctcgtcaccgaagtgagagtctacaactggttcgccaaccgtcgcaaagaagaagccttccgacataaactcgctatggacacatactcaggcccacctcccggccccggccccggtcccgcactccccgcgcactcatcccctggcctacccccacccgccctctcaccgtccaaagttcacggagtacgctacggccaaccggctacctcagaaacagcagaagtcccttcctcctccggcggcccactcgtcaccgtaagcactcccctacaccaagtatcacccaccggcctcgaaccatcccactccttgctgtcaacagaagccaaacttgtctcagcggccggtggaccactgccacccgtctccaccctcaccgcactccactcactcgaacaaaccagcccaggcctgaaccaacaaccccaaaacctaattatggcatcacttcccggagtcatgactattggacccggcgaaccagcatcattaggcccgacattcaccaacacaggagcttccaccctcgtcataggactagcctccacacaagctcaatccgtacccgttatcaactccatgggctcatccctcacaaccctacaacccgtacaattttcccagcccctacacccatcctaccaacaacccctaatgcctcccgtccaatcccatgtaactcaatcccccttcatggccaccatggcccaactccaatcaccccacgcactctactcccacaagccagaagtcgctcaatacacccacaccggactcctaccccagaccatgctaataaccgataccacaaacctctcagccctcgcctcactcactccaaccaaacaagtcttcaccagcgacaccgaagcctcatcagaatccggcctccatacccccgcctctcaagccaccacactacacgtcccatcgcaagaccccgcctccatccaacacttacaacccgcacaccgtctctcagcctcacctaccgtctcatcatccagtctagtcctataccaatcatctgactcctcaaacggccaatcccacctccttccttcaaaccactcagttatcgaaacgttcatctccactcaaatggcctcatccagccaataa

SEQ ID NO: 5681 - RNA, 1896 nt, synthetic construct
  misc_feature 1..1896: note = CDS (opt28) from Homo sapiens__NP_000536.6__HNF1A(1-631)
  source 1..1896: mol_type = other RNA
atggtgagcaagctgtcccagctgcagaccgagctgctggcagccctgctggaatctggactgtcaaaagaggctctgatccaggcactgggcgaaccagggccctacctgctggccggagagggccctctggacaagggggaaagttgcggaggcggacggggcgagctggctgaactgccaaacgggctgggagagacaaggggcagcgaggatgaaactgacgatgacggggaggacttcacaccccctattctgaaagaactggagaatctgtccccagaagaggcagcccaccagaaggctgtcgtggaaaccctgctgcaggaggatccctggagagtggcaaagatggtcaaatcttatctgcagcagcacaacatccctcagcgcgaagtggtggacactaccggactgaatcagagccacctgtcacagcatctgaacaagggcacaccaatgaaaactcagaagcgagccgctctgtacacctggtacgtccggaagcagagggaggtggcacagcagtttacacacgccgggcagggaggcctgatcgaggaacccaccggagacgagctgcctactaaaaaggggagacgcaatcggttcaaatggggcccagcaagtcagcagattctgtttcaggcttatgaaaggcagaagaacccctccaaggaggaaagagagacactggtggaagagtgcaatcgagccgagtgtatccagcggggagtcagcccttctcaggcacagggcctggggagcaacctggtgaccgaagtgcgcgtctacaactggttcgctaataggagaaaagaggaagcctttcggcataagctggcaatggatacttactccggaccaccccctggcccaggacccgggcctgctctgccagcccactcaagtcccggcctgcctccacccgcactgagcccttctaaagtgcacggagtgcgatatggccagccagctacctccgagacagccgaagtccccagctcaagtgggggacctctggtgaccgtgtctactccactgcatcaggtctcccccacaggcctggagcctagccacagcctgctgtccaccgaagcaaagctggtgtcagccgctggagggccactgcccccagtgtctacactgactgcactgcatagtctggagcagaccagccctggcctgaaccagcagccccagaatctgattatggcctccctgccaggagtcatgacaatcgggcctggcgaacccgcatctctgggaccaactttcaccaacacaggcgctagcaccctggtgatcggactggcatcaactcaggcccagagtgtgcctgtcattaattccatggggagctctctgacaaccctgcagcccgtgcagttcagccagccactgcacccttcctaccagcagcccctgatgccacctgtccaatcacacgtgactcagagtccctttatggctaccatggcacagctgcagagcccacatgccctgtactctcacaaacctgaggtggctcagtatacacataccggcctgctgccccagactatgctgatcacagacaccacaaacctgtccgcactggccagcctgactccaaccaagcaggtcttcacatcagatactgaggctagttccgaatctggactgcacacccctgcaagccaggccacaaccctgcatgtgccctcacaggacccagcaagcatccagcatctgcagcctgctcacaggctgtccgccagtcccactgtgtctagctcctcactggtcctgtaccagtctagcgacagttccaatgggcagagccatctgctgccatctaaccactcagtgattgagacctttatcagcacacagatggcatccagtagccagtga

SEQ ID NO: 5682 - RNA, 1896 nt, synthetic construct
  misc_feature 1..1896: note = CDS (opt29) from Homo sapiens__NP_000536.6__HNF1A(1-631)
  source 1..1896: mol_type = other RNA
atggtgagcaagctgagccagctgcagaccgagctgctggccgccctgctggaatctggcctgagcaaggaggccctgatccaggccctgggcgaacctggcccctacctgctggccggagagggccctctggacaagggcgaaagctgcggcggcggccggggcgagctggccgaactccccaacggcctgggggagaccagaggctccgaagacgagaccgatgacgacggcgaagacttcacacctccaatcctgaaggagctggagaacctgagccctgaagaggccgcccaccagaaggccgtggtggaaaccctgctgcaagaggacccctggcgggtggccaagatggtgaaaagctacctgcagcagcacaatatccctcagagagaagtggtggataccaccggcctgaaccagagccatctgagccagcacctgaacaagggaacccctatgaagacccagaagcgggccgctctgtacacatggtacgtgagaaagcaacgggaggtggcccagcagtttacccacgccggccagggcggcctgatcgaggaacccaccggcgacgaactgcctaccaagaagggcagacggaacagattcaagtggggcccggcctctcagcagatcctgttccaggcctacgagcggcagaagaaccctagcaaggaagagagagagaccctggtggaagagtgcaaccgggccgaatgtatccagagaggcgtgagccccagccaagcccagggactgggctccaatctggtgaccgaggtgcgggtgtacaactggtttgccaacagacggaaggaagaggccttcagacacaagctggccatggacacctacagcggccctccccctggccctggccccggccctgccctgccagcccacagcagccctggcctgccccctcctgcactgtctcccagcaaggtgcacggcgtgcggtacggacagcctgccacaagcgaaaccgccgaggtgcccagctccagcggcggccctctggtgaccgtgagcacccctctgcatcaggtgagccccaccggcctggaaccttctcacagcctgctcagcaccgaggccaagctggtgagcgccgccggcggccccctgcctccagtgagcaccctgacagccctgcactccctggaacagaccagccctggcctgaaccagcagccccagaacctgatcatggccagcctgcctggcgtgatgaccatcgggcctggcgagcccgcctctctgggccctaccttcaccaacaccggcgccagcacactggtgatcggactggccagcacccaagcccagagcgtgccggtgatcaatagcatgggctctagcctgaccaccctgcagcctgtgcagttcagccagcccctgcacccttcctaccagcagcccctgatgcctcctgtgcaaagccacgtgacccagagcccctttatggccaccatggcccagctgcagagccctcacgccctgtacagccataaaccagaggtggcccagtacacccacacaggcctgctgcctcagaccatgctgatcaccgacaccaccaacctgtctgccctggccagcctgacccccaccaaacaggtgttcacaagcgataccgaagccagctccgagagcggcctgcacacccctgccagccaggccaccaccctgcacgtgcctagccaagaccccgcctctatccagcacctccagcctgcccacagactgagcgctagccccaccgtgagctccagcagcctggtgctgtaccagagctctgacagcagcaacggccagagccatctgctgcctagcaaccactccgtgatcgaaaccttcattagcacacagatggccagctctagccagtga

SEQ ID NO: 5683 - RNA, 2113 nt, synthetic construct
  misc_feature 1..2113: note = mRNA i-3 (A64-N5-C30-hSL-N5) (wt) from Homo sapiens__NP_000536.6__HNF1A(1-631)
  source 1..2113: mol_type = other RNA
aggagaaagcttaccatggtttctaaactgagccagctgcagacggagctcctggcggccctgctcgagtcagggctgagcaaagaggcactgatccaggcactgggtgagccggggccctacctcctggctggagaaggccccctggacaagggggagtcctgcggcggcggtcgaggggagctggctgagctgcccaatgggctgggggagactcggggctccgaggacgagacggacgacgatggggaagacttcacgccacccatcctcaaagagctggagaacctcagccctgaggaggcggcccaccagaaagccgtggtggagacccttctgcaggaggacccgtggcgtgtggcgaagatggtcaagtcctacctgcagcagcacaacatcccacagcgggaggtggtcgataccactggcctcaaccagtcccacctgtcccaacacctcaacaagggcactcccatgaagacgcagaagcgggccgccctgtacacctggtacgtccgcaagcagcgagaggtggcgcagcagttcacccatgcagggcagggagggctgattgaagagcccacaggtgatgagctaccaaccaagaaggggcggaggaaccgtttcaagtggggcccagcatcccagcagatcctgttccaggcctatgagaggcagaagaaccctagcaaggaggagcgagagacgctagtggaggagtgcaatagggcggaatgcatccagagaggggtgtccccatcacaggcacaggggctgggctccaacctcgtcacggaggtgcgtgtctacaactggtttgccaaccggcgcaaagaagaagccttccggcacaagctggccatggacacgtacagcgggccccccccagggccaggcccgggacctgcgctgcccgctcacagctcccctggcctgcctccacctgccctctcccccagtaaggtccacggtgtgcgctatggacagcctgcgaccagtgagactgcagaagtaccctcaagcagcggcggtcccttagtgacagtgtctacacccctccaccaagtgtcccccacgggcctggagcccagccacagcctgctgagtacagaagccaagctggtctcagcagctgggggccccctcccccctgtcagcaccctgacagcactgcacagcttggagcagacatccccaggcctcaaccagcagccccagaacctcatcatggcctcacttcctggggtcatgaccatcgggcctggtgagcctgcctccctgggtcctacgttcaccaacacaggtgcctccaccctggtcatcggcctggcctccacgcaggcacagagtgtgccggtcatcaacagcatgggcagcagcctgaccaccctgcagcccgtccagttctcccagccgctgcacccctcctaccagcagccgctcatgccacctgtgcagagccatgtgacccagagccccttcatggccaccatggctcagctgcagagcccccacgccctctacagccacaagcccgaggtggcccagtacacccacacgggcctgctcccgcagactatgctcatcaccgacaccaccaacctgagcgccctggccagcctcacgcccaccaagcaggtcttcacctcagacactgaggcctccagtgagtccgggcttcacacgccggcatctcaggccaccaccctccacgtccccagccaggaccctgccagcatccagcacctgcagccggcccaccggctcagcgccagccccacagtgtcctccagcagcctggtgctgtaccagagctcagactccagcaatggccagagccacctgctgccatccaaccacagcgtcatcgagaccttcatctccacccagatggcctcttcctcccagtaaggactagttataagactgactagcccgatgggcctcccaacgggccctcctcccctccttgcaccgagattaataaaaaaaaaaaaaaaaaaaaaaaaaaaaaaaaaaaaaaaaaaaaaaaaaaaaaaaaaaaaaaaatgcatcccccccccccccccccccccccccccccccaaaggctcttttcagagccaccagaatt

SEQ ID NO: 5684 - RNA, 2113 nt, synthetic construct
  misc_feature 1..2113: note = mRNA i-3 (A64-N5-C30-hSL-N5) (wt mod) from Homo sapiens__NP_000536.6__HNF1A(1-631)
  source 1..2113: mol_type = other RNA
aggagaaagcttaccatggtttctaaactgagccagctgcagacggagctcctggcggccctgctcgagtcagggctgagcaaagaggcactgatccaggcactgggtgagccggggccctacctcctggctggagaaggccccctggacaagggggagtcctgcggcggcggtcgaggggagctggctgagctgcccaatgggctgggggagactcggggctccgaggacgagacggacgacgatggggaagacttcacgccacccatcctcaaagagctggagaacctcagccctgaggaggcggcccaccagaaagccgtggtggagacccttctgcaggaggacccgtggcgtgtggcgaagatggtcaagtcctacctgcagcagcacaacatcccacagcgggaggtggtcgataccactggcctcaaccagtcccacctgtcccaacacctcaacaagggcactcccatgaagacgcagaagcgggccgccctgtacacctggtacgtccgcaagcagcgagaggtggcgcagcagttcacccacgcagggcagggagggctgattgaggaacccacaggtgatgagctaccaaccaagaaggggcggaggaaccgtttcaagtggggcccagcatcccagcagatcctgttccaggcctatgagaggcagaagaaccctagcaaggaggagcgagagacgctagtggaggagtgcaatagggcggaatgcatccagagaggggtgtccccatcacaggcacaggggctgggctccaacctcgtcacggaggtgcgtgtctacaactggtttgccaaccggcgcaaagaagaagccttccggcacaagctggccatggacacgtacagcgggccacccccagggccaggcccgggacctgcgctgcccgctcacagctcccctggcctgcctccccctgccctctcccccagtaaggtccacggtgtgcgctatggacagcctgcgaccagtgagactgcagaagtaccctcaagcagcggcggtcccttagtgacagtgtctacacccctccaccaagtgtcccccacgggcctggagcccagccacagcctgctgagtacagaagccaagctggtctcagcagctgggggccccctgccccctgtcagcaccctgacagcactgcacagcttggagcagacatccccaggcctcaaccagcagccccagaacctcatcatggcctcacttcctggggtcatgaccatcgggcctggtgagcctgcctccctgggtcctacgttcaccaacacaggtgcctccaccctggtcatcggcctggcctccacgcaggcacagagtgtgccggtcatcaacagcatgggcagcagcctgaccaccctgcagcccgtccagttctcccagccgctgcacccctcctaccagcagccgctcatgccacctgtgcagagccatgtgacccagagccccttcatggccaccatggctcagctgcagagcccccacgccctctacagccacaagcccgaggtggcccagtacacccacacgggcctgctcccgcagactatgctcatcaccgacaccaccaacctgagcgccctggccagcctcacgcccaccaagcaggtcttcacctcagacactgaggcctccagtgagtccgggcttcacacgccggcatctcaggccaccaccctccacgtccccagccaggaccctgccagcatccagcacctccagccggcccaccggctcagcgccagccccacagtgtcctccagcagcctggtgctgtaccagagctcagactccagcaatggccagagccatctgctgccatccaaccacagcgtcatcgagaccttcatctccacccagatggcctcttcctcccagtgaggactagttataagactgactagcccgatgggcctcccaacgggccctcctcccctccttgcaccgagattaataaaaaaaaaaaaaaaaaaaaaaaaaaaaaaaaaaaaaaaaaaaaaaaaaaaaaaaaaaaaaaaatgcatcccccccccccccccccccccccccccccccaaaggctcttttcagagccaccagaatt

SEQ ID NO: 5685 - RNA, 2113 nt, synthetic construct
  misc_feature 1..2113: note = mRNA i-3 (A64-N5-C30-hSL-N5) (opt1) from Homo sapiens__NP_000536.6__HNF1A(1-631)
  source 1..2113: mol_type = other RNA
aggagaaagcttaccatggtgagcaagctgtcccagctgcagaccgagctgctggccgccctcctggagagcggcctgtccaaggaggcgctcatccaggccctgggggagcccggcccgtacctgctcgccggggagggccccctggacaagggggagagctgcggcggcgggcgcggcgagctggccgagctccccaacgggctgggcgagacccgggggtccgaggacgagacggacgacgacggcgaggacttcacgcccccgatcctgaaggagctcgagaacctgagccccgaggaggccgcgcaccagaaggccgtcgtggagaccctgctccaggaggacccctggcgcgtggccaagatggtcaagtcctacctgcagcagcacaacatcccccagcgggaggtggtggacaccaccggcctgaaccagagccacctctcccagcacctgaacaaggggaccccgatgaagacccagaagcgcgccgcgctgtacacctggtacgtccggaagcagcgcgaggtggcccagcagttcacgcacgccggccagggcggcctcatcgaggagcccaccggcgacgagctgcccaccaagaaggggcggcgcaaccggttcaagtggggccccgccagccagcagatcctgttccaggcctacgagcgccagaagaacccgtccaaggaggagcgggagaccctcgtggaggagtgcaaccgcgcggagtgcatccagcgcggggtcagcccctcccaggcccagggcctggggagcaacctggtgacggaggtgcgggtctacaactggttcgccaaccggcgcaaggaggaggccttccggcacaagctcgccatggacacctactccgggcccccgcccggccccgggcccggccccgcgctgccggcccacagctcccccgggctgcccccgcccgccctcagcccctccaaggtgcacggcgtgcgctacgggcagcccgccaccagcgagaccgccgaggtccccagctccagcggcggcccgctggtgacggtgtccacgcccctgcaccaggtcagccccaccgggctcgagccgtcccacagcctgctgtccaccgaggcgaagctcgtgagcgccgccggcgggcccctgccgcccgtgtccaccctgaccgccctccacagcctggagcagacctcccccggcctgaaccagcagccccagaacctcatcatggccagcctgcccggggtcatgaccatcggccccggcgagccggcgtccctggggcccacgttcaccaacaccggcgccagcaccctggtgatcgggctcgcctccacgcaggcccagagcgtgcccgtcatcaactccatgggcagctccctgaccaccctgcagcccgtgcagttcagccagccgctccaccccagctaccagcagcccctgatgcccccggtccagtcccacgtgacccagagccccttcatggcgacgatggcccagctgcagagcccccacgccctctactcccacaagcccgaggtggcccagtacacccacaccggcctgctgccgcagaccatgctcatcacggacaccaccaacctgtccgccctggcgagcctcacccccaccaagcaggtcttcacgtccgacaccgaggccagctccgagagcgggctgcacacccccgcctcccaggccaccacgctgcacgtgcccagccaggacccggcctccatccagcacctccagcccgcgcaccggctgagcgcctcccccaccgtgagctccagcagcctggtcctctaccagtccagcgactccagcaacggccagtcccacctcctgccgagcaaccactccgtgatcgagaccttcatcagcacccagatggcctccagctcccagtgaggactagttataagactgactagcccgatgggcctcccaacgggccctcctcccctccttgcaccgagattaataaaaaaaaaaaaaaaaaaaaaaaaaaaaaaaaaaaaaaaaaaaaaaaaaaaaaaaaaaaaaaaatgcatcccccccccccccccccccccccccccccccaaaggctcttttcagagccaccagaatt

SEQ ID NO: 5686 - RNA, 2113 nt, synthetic construct
  misc_feature 1..2113: note = mRNA i-3 (A64-N5-C30-hSL-N5) (opt2) from Homo sapiens__NP_000536.6__HNF1A(1-631)
  source 1..2113: mol_type = other RNA
aggagaaagcttaccatggtctccaagctctcccagctccagaccgagctcctcgccgccctcctcgagtccggcctctccaaggaggccctcatccaggccctcggcgagcccggcccctacctcctcgccggcgagggccccctcgacaagggcgagtcctgcggcggcggccgcggcgagctcgccgagctccccaacggcctcggcgagacccgcggctccgaggacgagaccgacgacgacggcgaggacttcaccccccccatcctcaaggagctcgagaacctctcccccgaggaggccgcccaccagaaggccgtcgtcgagaccctcctccaggaggacccctggcgcgtcgccaagatggtcaagtcctacctccagcagcacaacatcccccagcgcgaggtcgtcgacaccaccggcctcaaccagtcccacctctcccagcacctcaacaagggcacccccatgaagacccagaagcgcgccgccctctacacctggtacgtccgcaagcagcgcgaggtcgcccagcagttcacccacgccggccagggcggcctcatcgaggagcccaccggcgacgagctccccaccaagaagggccgccgcaaccgcttcaagtggggccccgcctcccagcagatcctcttccaggcctacgagcgccagaagaacccctccaaggaggagcgcgagaccctcgtcgaggagtgcaaccgcgccgagtgcatccagcgcggcgtctccccctcccaggcccagggcctcggctccaacctcgtcaccgaggtccgcgtctacaactggttcgccaaccgccgcaaggaggaggccttccgccacaagctcgccatggacacctactccggccccccccccggccccggccccggccccgccctccccgcccactcctcccccggcctccccccccccgccctctccccctccaaggtccacggcgtccgctacggccagcccgccacctccgagaccgccgaggtcccctcctcctccggcggccccctcgtcaccgtctccacccccctccaccaggtctcccccaccggcctcgagccctcccactccctcctctccaccgaggccaagctcgtctccgccgccggcggccccctcccccccgtctccaccctcaccgccctccactccctcgagcagacctcccccggcctcaaccagcagccccagaacctcatcatggcctccctccccggcgtcatgaccatcggccccggcgagcccgcctccctcggccccaccttcaccaacaccggcgcctccaccctcgtcatcggcctcgcctccacccaggcccagtccgtccccgtcatcaactccatgggctcctccctcaccaccctccagcccgtccagttctcccagcccctccacccctcctaccagcagcccctcatgccccccgtccagtcccacgtcacccagtcccccttcatggccaccatggcccagctccagtccccccacgccctctactcccacaagcccgaggtcgcccagtacacccacaccggcctcctcccccagaccatgctcatcaccgacaccaccaacctctccgccctcgcctccctcacccccaccaagcaggtcttcacctccgacaccgaggcctcctccgagtccggcctccacacccccgcctcccaggccaccaccctccacgtcccctcccaggaccccgcctccatccagcacctccagcccgcccaccgcctctccgcctcccccaccgtctcctcctcctccctcgtcctctaccagtcctccgactcctccaacggccagtcccacctcctcccctccaaccactccgtcatcgagaccttcatctccacccagatggcctcctcctcccagtgaggactagttataagactgactagcccgatgggcctcccaacgggccctcctcccctccttgcaccgagattaataaaaaaaaaaaaaaaaaaaaaaaaaaaaaaaaaaaaaaaaaaaaaaaaaaaaaaaaaaaaaaaatgcatcccccccccccccccccccccccccccccccaaaggctcttttcagagccaccagaatt

SEQ ID NO: 5687 - RNA, 2113 nt, synthetic construct
  misc_feature 1..2113: note = mRNA i-3 (A64-N5-C30-hSL-N5) (opt3) from Homo sapiens__NP_000536.6__HNF1A(1-631)
  source 1..2113: mol_type = other RNA
aggagaaagcttaccatggtgagcaagctgtcccagctccaaaccgagcttctggccgctttgttagaatctggcctgtcaaaagaggcactaatccaggccctcggggaacccggaccttacctgcttgcgggtgagggcccactggacaagggggaaagttgcggaggcggtagaggggagttggctgagctcccgaacggactgggcgaaacaaggggcagcgaggatgaaactgacgatgacggggaggatttcacgccccctattctgaaagagctcgaaaatttatccccagaggaagccgcacaccagaaggccgtcgttgagaccctgcttcaggaagacccctggcgggtggctaaaatggtaaagtcttatttgcaacagcataacatacctcagcgcgaggtggtcgatacaactggactgaatcagtcgcacctatcacaacatctcaacaagggtaccccaatgaaaacacagaagcgagcagccctgtacacctggtatgtgcgtaaacagagagaggttgctcagcaatttactcacgccggccaagggggacttatcgaggaacccacaggcgacgaactgcctaccaagaaaggtaggcggaatcgcttcaagtgggggccagcgagccagcagattttgtttcaggcatacgagagacagaagaacccgagtaaagaagagagggagacgctcgtggaagagtgtaatcgggccgaatgcatccagcgcggagtctccccctctcaagctcagggcctgggcagcaacttagtgactgaggtacgagtttataattggttcgccaacagaaggaaggaagaggcatttcggcataaactggctatggatacctactccgggcctccacccggacctggtccaggccccgccctcccggcgcactcaagtcctgggcttccccctccagccctgagcccctctaaggtgcacggagtccgttatggccagccagcaacatccgagactgctgaagtgccctcaagcagtggtgggcctttggtgaccgtctctacaccactacatcaggtttccccgaccggcctggagcccagccactcgctcctgtctacggaagccaaacttgtgtccgctgccggaggccctctgccacccgtatcaactttgacagcactccatagtctggagcaaaccagccctgggttaaatcagcagccacagaacctgattatggcctccctacccggagtgatgactatcggtccgggcgagcctgcttctctcgggccaacattcaccaatacgggagcgagcaccctggtcataggccttgcatcaacacaagcccagagtgtgcccgttatcaactccatgggtagctctttgactaccctgcagcctgtgcagttttcacaacccctccacccaagttaccagcagcctctgatgcccccagtccaaagccacgtgacacagtccccgttcatggctactatggcccagcttcagtctcctcatgcactgtactcgcacaagcccgaagtagcccaatatacccatacagggttgctcccacagaccatgctgattactgacacgacaaatttaagcgctctggcctccctaacccccactaaacaggtttttacctcagatacagaggcaagttctgaaagcggcctccacacccctgcgtcccaggctactacactgcatgtgccatcacaagaccccgccagcatccagcaccttcagcctgcacaccgcttgtctgcctccccgacggtcagttctagctccctggtgctctaccagtcaagtgatagctcgaacggacaatcccatctgttaccatctaaccacagcgtcattgagaccttcatctcaactcagatggctagttcctctcagtgaggactagttataagactgactagcccgatgggcctcccaacgggccctcctcccctccttgcaccgagattaataaaaaaaaaaaaaaaaaaaaaaaaaaaaaaaaaaaaaaaaaaaaaaaaaaaaaaaaaaaaaaaatgcatcccccccccccccccccccccccccccccccaaaggctcttttcagagccaccagaatt

SEQ ID NO: 5688 - RNA, 2113 nt, synthetic construct
  misc_feature 1..2113: note = mRNA i-3 (A64-N5-C30-hSL-N5) (opt4) from Homo sapiens__NP_000536.6__HNF1A(1-631)
  source 1..2113: mol_type = other RNA
aggagaaagcttaccatggtgagcaagctgagccagctgcagaccgagctgctggccgccctgctggagagcggcctgagcaaggaggccctgatccaggccctgggcgagcccggcccctacctgctggccggcgagggccccctggacaagggcgagagctgcggcggcggcagaggcgagctggccgagctgcccaacggcctgggcgagaccagaggcagcgaggacgagaccgacgacgacggcgaggacttcaccccccccatcctgaaggagctggagaacctgagccccgaggaggccgcccaccagaaggccgtggtggagaccctgctgcaggaggacccctggagagtggccaagatggtgaagagctacctgcagcagcacaacatcccccagagagaggtggtggacaccaccggcctgaaccagagccacctgagccagcacctgaacaagggcacccccatgaagacccagaagagagccgccctgtacacctggtacgtgagaaagcagagagaggtggcccagcagttcacccacgccggccagggcggcctgatcgaggagcccaccggcgacgagctgcccaccaagaagggcagaagaaacagattcaagtggggccccgccagccagcagatcctgttccaggcctacgagagacagaagaaccccagcaaggaggagagagagaccctggtggaggagtgcaacagagccgagtgcatccagagaggcgtgagccccagccaggcccagggcctgggcagcaacctggtgaccgaggtgagagtgtacaactggttcgccaacagaagaaaggaggaggccttcagacacaagctggccatggacacctacagcggccccccccccggccccggccccggccccgccctgcccgcccacagcagccccggcctgcccccccccgccctgagccccagcaaggtgcacggcgtgagatacggccagcccgccaccagcgagaccgccgaggtgcccagcagcagcggcggccccctggtgaccgtgagcacccccctgcaccaggtgagccccaccggcctggagcccagccacagcctgctgagcaccgaggccaagctggtgagcgccgccggcggccccctgccccccgtgagcaccctgaccgccctgcacagcctggagcagaccagccccggcctgaaccagcagccccagaacctgatcatggccagcctgcccggcgtgatgaccatcggccccggcgagcccgccagcctgggccccaccttcaccaacaccggcgccagcaccctggtgatcggcctggccagcacccaggcccagagcgtgcccgtgatcaacagcatgggcagcagcctgaccaccctgcagcccgtgcagttcagccagcccctgcaccccagctaccagcagcccctgatgccccccgtgcagagccacgtgacccagagccccttcatggccaccatggcccagctgcagagcccccacgccctgtacagccacaagcccgaggtggcccagtacacccacaccggcctgctgccccagaccatgctgatcaccgacaccaccaacctgagcgccctggccagcctgacccccaccaagcaggtgttcaccagcgacaccgaggccagcagcgagagcggcctgcacacccccgccagccaggccaccaccctgcacgtgcccagccaggaccccgccagcatccagcacctgcagcccgcccacagactgagcgccagccccaccgtgagcagcagcagcctggtgctgtaccagagcagcgacagcagcaacggccagagccacctgctgcccagcaaccacagcgtgatcgagaccttcatcagcacccagatggccagcagcagccagtgaggactagttataagactgactagcccgatgggcctcccaacgggccctcctcccctccttgcaccgagattaataaaaaaaaaaaaaaaaaaaaaaaaaaaaaaaaaaaaaaaaaaaaaaaaaaaaaaaaaaaaaaaatgcatcccccccccccccccccccccccccccccccaaaggctcttttcagagccaccagaatt

SEQ ID NO: 5689 - RNA, 2113 nt, synthetic construct
  misc_feature 1..2113: note = mRNA i-3 (A64-N5-C30-hSL-N5) (opt5) from Homo sapiens__NP_000536.6__HNF1A(1-631)
  source 1..2113: mol_type = other RNA
aggagaaagcttaccatggtgagcaagctgtcccagctccaaaccgagctgcttgccgctctgctcgaatctggcctgagcaaagaggcccttatccaggcgctgggggaacccggaccttacctcctggctggcgaggggccgctggacaagggagaatcctgcggcgggggaagaggcgagctcgccgagctgcccaacggccttggggaaacacggggatctgaggatgaaacggacgatgacggcgaggatttcacccctcccattctgaaagagctcgaaaatctgagccctgaggaagccgctcaccagaaggccgtcgttgagacacttctgcaggaagacccctggcgcgtggctaaaatggtgaagtcctatctccaacagcataacatccctcagagagaggtcgtggataccacagggctgaatcagtctcacctgagccaacatctcaacaagggaaccccgatgaaaacacagaagcgggccgcgctgtacacctggtatgttcgcaaacagagagaggtggcccagcaatttacgcacgctggccaagggggacttattgaagaacccaccggcgacgaactgcctacaaagaaaggccggcgcaatagattcaagtgggggcccgcctcccagcagatcctctttcaggcttacgagcggcagaagaaccctagcaaagaggagcgcgagaccctggtcgaagagtgtaatagagccgaatgcattcagcggggagtgtctccctcccaagcgcagggccttgggagcaacctggttacagaggtgcgcgtctataattggttcgccaacagacggaaggaagaggcttttcgccataaactcgccatggatacctactctggaccgcctcccggccctgggcccggacccgctctgcctgcccactccagcccgggcctgccccctcccgccctctctccttccaaggtgcacggcgtgagatatgggcagcccgctacgagcgagacagcggaagtcccgtcctctagcggaggccctctggttaccgtgtccacaccccttcatcaggtgagccctaccgggctggagccctctcactccctcctgagcaccgaagccaaacttgtctctgctgccggaggccctctgcccccggtgagcacactcacggccctgcattccctggagcaaacctctcctgggctcaatcagcagccccagaacctgatcatggctagccttcccggcgttatgacaatcggacctggcgagccggcctccctggggcccaccttcacaaataccggagcgagcacgctcgtgattggcctggcttctacacaagcccagtccgtccctgtgatcaacagcatggggtcttccctgaccacccttcagcccgttcagtttagccaacctctccacccctcctaccagcagcctctgatgcccccggtgcaatctcacgtcacacagagccctttcatggccaccatggctcagctgcagagcccccatgccctctactctcacaagcctgaagtggctcaatatacacatacgggactgcttccccagaccatgctgattacagacaccacaaatctcagcgccctggcgtccctgaccccgacgaaacaggtctttaccagcgatacagaggcctcttccgaaagcggccttcacacccctgcttctcaggccacaaccctccatgtgccctcccaagaccctgctagcatccagcatctgcagcccgcccaccggctgtctgcgagccccacggtttcctcctcttccctcgtgctgtaccagagctccgattctagcaacgggcaatcccaccttctgccttctaaccacagcgtcattgagacattcatctccacccagatggcctctagctcccagtgaggactagttataagactgactagcccgatgggcctcccaacgggccctcctcccctccttgcaccgagattaataaaaaaaaaaaaaaaaaaaaaaaaaaaaaaaaaaaaaaaaaaaaaaaaaaaaaaaaaaaaaaaatgcatcccccccccccccccccccccccccccccccaaaggctcttttcagagccaccagaatt

SEQ ID NO: 5690 - RNA, 2113 nt, synthetic construct
  misc_feature 1..2113: note = mRNA i-3 (A64-N5-C30-hSL-N5) (opt11) from Homo sapiens__NP_000536.6__HNF1A(1-631)
  source 1..2113: mol_type = other RNA
aggagaaagcttaccatggtatccaaactctcccaactccaaaccgaacttctcgcagcccttctagagagcggcctttccaaagaagccctgatacaagcactcggagaacccggcccatacctcctcgccggcgagggccctttagacaaaggtgaatcctgcggtggtggtcgtggagaactagctgaactaccgaacggcttaggcgaaacccgaggctccgaagatgaaaccgacgacgatggtgaggacttcacacccccaatactaaaagaactagaaaacctctcacccgaagaagccgctcaccaaaaagccgttgtagaaaccctactccaagaagacccctggcgagtagcgaaaatggtaaaatcatacctccaacaacacaacatcccccaacgcgaagtcgtcgacacaaccggcctaaaccaatcccacctctcccaacacctcaacaaaggcacaccaatgaaaacacaaaaacgcgcagccctctacacatggtacgtacgaaaacaacgcgaagtcgcccaacaattcacacacgccggacaaggaggactaatcgaagaacccaccggcgacgaactacctacaaagaaaggccgccgaaaccgtttcaaatggggccccgcctcacaacaaatcctattccaagcctacgaacgccagaaaaaccccagcaaagaagaacgagaaaccctcgtcgaagaatgcaatcgcgcggagtgcattcaacgaggcgtctctccctcccaagcccaaggacttggctccaacctcgtcaccgaagtgagagtctacaactggttcgccaaccgtcgcaaagaagaagccttccgacataaactcgctatggacacatactcaggcccacctcccggccccggccccggtcccgcactccccgcgcactcatcccctggcctacccccacccgccctctcaccgtccaaagttcacggagtacgctacggccaaccggctacctcagaaacagcagaagtcccttcctcctccggcggcccactcgtcaccgtaagcactcccctacaccaagtatcacccaccggcctcgaaccatcccactccttgctgtcaacagaagccaaacttgtctcagcggccggtggaccactgccacccgtctccaccctcaccgcactccactcactcgaacaaaccagcccaggcctgaaccaacaaccccaaaacctaattatggcatcacttcccggagtcatgactattggacccggcgaaccagcatcattaggcccgacattcaccaacacaggagcttccaccctcgtcataggactagcctccacacaagctcaatccgtacccgttatcaactccatgggctcatccctcacaaccctacaacccgtacaattttcccagcccctacacccatcctaccaacaacccctaatgcctcccgtccaatcccatgtaactcaatcccccttcatggccaccatggcccaactccaatcaccccacgcactctactcccacaagccagaagtcgctcaatacacccacaccggactcctaccccagaccatgctaataaccgataccacaaacctctcagccctcgcctcactcactccaaccaaacaagtcttcaccagcgacaccgaagcctcatcagaatccggcctccatacccccgcctctcaagccaccacactacacgtcccatcgcaagaccccgcctccatccaacacttacaacccgcacaccgtctctcagcctcacctaccgtctcatcatccagtctagtcctataccaatcatctgactcctcaaacggccaatcccacctccttccttcaaaccactcagttatcgaaacgttcatctccactcaaatggcctcatccagccaataaggactagttataagactgactagcccgatgggcctcccaacgggccctcctcccctccttgcaccgagattaataaaaaaaaaaaaaaaaaaaaaaaaaaaaaaaaaaaaaaaaaaaaaaaaaaaaaaaaaaaaaaaatgcatcccccccccccccccccccccccccccccccaaaggctcttttcagagccaccagaatt

SEQ ID NO: 5691 - RNA, 2113 nt, synthetic construct
  misc_feature 1..2113: note = mRNA i-3 (A64-N5-C30-hSL-N5) (opt28) from Homo sapiens__NP_000536.6__HNF1A(1-631)
  source 1..2113: mol_type = other RNA
aggagaaagcttaccatggtgagcaagctgtcccagctgcagaccgagctgctggcagccctgctggaatctggactgtcaaaagaggctctgatccaggcactgggcgaaccagggccctacctgctggccggagagggccctctggacaagggggaaagttgcggaggcggacggggcgagctggctgaactgccaaacgggctgggagagacaaggggcagcgaggatgaaactgacgatgacggggaggacttcacaccccctattctgaaagaactggagaatctgtccccagaagaggcagcccaccagaaggctgtcgtggaaaccctgctgcaggaggatccctggagagtggcaaagatggtcaaatcttatctgcagcagcacaacatccctcagcgcgaagtggtggacactaccggactgaatcagagccacctgtcacagcatctgaacaagggcacaccaatgaaaactcagaagcgagccgctctgtacacctggtacgtccggaagcagagggaggtggcacagcagtttacacacgccgggcagggaggcctgatcgaggaacccaccggagacgagctgcctactaaaaaggggagacgcaatcggttcaaatggggcccagcaagtcagcagattctgtttcaggcttatgaaaggcagaagaacccctccaaggaggaaagagagacactggtggaagagtgcaatcgagccgagtgtatccagcggggagtcagcccttctcaggcacagggcctggggagcaacctggtgaccgaagtgcgcgtctacaactggttcgctaataggagaaaagaggaagcctttcggcataagctggcaatggatacttactccggaccaccccctggcccaggacccgggcctgctctgccagcccactcaagtcccggcctgcctccacccgcactgagcccttctaaagtgcacggagtgcgatatggccagccagctacctccgagacagccgaagtccccagctcaagtgggggacctctggtgaccgtgtctactccactgcatcaggtctcccccacaggcctggagcctagccacagcctgctgtccaccgaagcaaagctggtgtcagccgctggagggccactgcccccagtgtctacactgactgcactgcatagtctggagcagaccagccctggcctgaaccagcagccccagaatctgattatggcctccctgccaggagtcatgacaatcgggcctggcgaacccgcatctctgggaccaactttcaccaacacaggcgctagcaccctggtgatcggactggcatcaactcaggcccagagtgtgcctgtcattaattccatggggagctctctgacaaccctgcagcccgtgcagttcagccagccactgcacccttcctaccagcagcccctgatgccacctgtccaatcacacgtgactcagagtccctttatggctaccatggcacagctgcagagcccacatgccctgtactctcacaaacctgaggtggctcagtatacacataccggcctgctgccccagactatgctgatcacagacaccacaaacctgtccgcactggccagcctgactccaaccaagcaggtcttcacatcagatactgaggctagttccgaatctggactgcacacccctgcaagccaggccacaaccctgcatgtgccctcacaggacccagcaagcatccagcatctgcagcctgctcacaggctgtccgccagtcccactgtgtctagctcctcactggtcctgtaccagtctagcgacagttccaatgggcagagccatctgctgccatctaaccactcagtgattgagacctttatcagcacacagatggcatccagtagccagtgaggactagttataagactgactagcccgatgggcctcccaacgggccctcctcccctccttgcaccgagattaataaaaaaaaaaaaaaaaaaaaaaaaaaaaaaaaaaaaaaaaaaaaaaaaaaaaaaaaaaaaaaaatgcatcccccccccccccccccccccccccccccccaaaggctcttttcagagccaccagaatt

SEQ ID NO: 5692 - RNA, 2113 nt, synthetic construct
  misc_feature 1..2113: note = mRNA i-3 (A64-N5-C30-hSL-N5) (opt29) from Homo sapiens__NP_000536.6__HNF1A(1-631)
  source 1..2113: mol_type = other RNA
aggagaaagcttaccatggtgagcaagctgagccagctgcagaccgagctgctggccgccctgctggaatctggcctgagcaaggaggccctgatccaggccctgggcgaacctggcccctacctgctggccggagagggccctctggacaagggcgaaagctgcggcggcggccggggcgagctggccgaactccccaacggcctgggggagaccagaggctccgaagacgagaccgatgacgacggcgaagacttcacacctccaatcctgaaggagctggagaacctgagccctgaagaggccgcccaccagaaggccgtggtggaaaccctgctgcaagaggacccctggcgggtggccaagatggtgaaaagctacctgcagcagcacaatatccctcagagagaagtggtggataccaccggcctgaaccagagccatctgagccagcacctgaacaagggaacccctatgaagacccagaagcgggccgctctgtacacatggtacgtgagaaagcaacgggaggtggcccagcagtttacccacgccggccagggcggcctgatcgaggaacccaccggcgacgaactgcctaccaagaagggcagacggaacagattcaagtggggcccggcctctcagcagatcctgttccaggcctacgagcggcagaagaaccctagcaaggaagagagagagaccctggtggaagagtgcaaccgggccgaatgtatccagagaggcgtgagccccagccaagcccagggactgggctccaatctggtgaccgaggtgcgggtgtacaactggtttgccaacagacggaaggaagaggccttcagacacaagctggccatggacacctacagcggccctccccctggccctggccccggccctgccctgccagcccacagcagccctggcctgccccctcctgcactgtctcccagcaaggtgcacggcgtgcggtacggacagcctgccacaagcgaaaccgccgaggtgcccagctccagcggcggccctctggtgaccgtgagcacccctctgcatcaggtgagccccaccggcctggaaccttctcacagcctgctcagcaccgaggccaagctggtgagcgccgccggcggccccctgcctccagtgagcaccctgacagccctgcactccctggaacagaccagccctggcctgaaccagcagccccagaacctgatcatggccagcctgcctggcgtgatgaccatcgggcctggcgagcccgcctctctgggccctaccttcaccaacaccggcgccagcacactggtgatcggactggccagcacccaagcccagagcgtgccggtgatcaatagcatgggctctagcctgaccaccctgcagcctgtgcagttcagccagcccctgcacccttcctaccagcagcccctgatgcctcctgtgcaaagccacgtgacccagagcccctttatggccaccatggcccagctgcagagccctcacgccctgtacagccataaaccagaggtggcccagtacacccacacaggcctgctgcctcagaccatgctgatcaccgacaccaccaacctgtctgccctggccagcctgacccccaccaaacaggtgttcacaagcgataccgaagccagctccgagagcggcctgcacacccctgccagccaggccaccaccctgcacgtgcctagccaagaccccgcctctatccagcacctccagcctgcccacagactgagcgctagccccaccgtgagctccagcagcctggtgctgtaccagagctctgacagcagcaacggccagagccatctgctgcctagcaaccactccgtgatcgaaaccttcattagcacacagatggccagctctagccagtgaggactagttataagactgactagcccgatgggcctcccaacgggccctcctcccctccttgcaccgagattaataaaaaaaaaaaaaaaaaaaaaaaaaaaaaaaaaaaaaaaaaaaaaaaaaaaaaaaaaaaaaaaatgcatcccccccccccccccccccccccccccccccaaaggctcttttcagagccaccagaatt

SEQ ID NO: 5693 - RNA, 2168 nt, synthetic construct
  misc_feature 1..2168: note = mRNA a-1 (hSL-A100) (wt) from Homo sapiens__NP_000536.6__HNF1A(1-631)
  source 1..2168: mol_type = other RNA
aggagagtcccgcagtcggcgtccagcggctctgcttgttcgtgtgtgtgtcgttgcaggccttattcaagcttaccatggtttctaaactgagccagctgcagacggagctcctggcggccctgctcgagtcagggctgagcaaagaggcactgatccaggcactgggtgagccggggccctacctcctggctggagaaggccccctggacaagggggagtcctgcggcggcggtcgaggggagctggctgagctgcccaatgggctgggggagactcggggctccgaggacgagacggacgacgatggggaagacttcacgccacccatcctcaaagagctggagaacctcagccctgaggaggcggcccaccagaaagccgtggtggagacccttctgcaggaggacccgtggcgtgtggcgaagatggtcaagtcctacctgcagcagcacaacatcccacagcgggaggtggtcgataccactggcctcaaccagtcccacctgtcccaacacctcaacaagggcactcccatgaagacgcagaagcgggccgccctgtacacctggtacgtccgcaagcagcgagaggtggcgcagcagttcacccatgcagggcagggagggctgattgaagagcccacaggtgatgagctaccaaccaagaaggggcggaggaaccgtttcaagtggggcccagcatcccagcagatcctgttccaggcctatgagaggcagaagaaccctagcaaggaggagcgagagacgctagtggaggagtgcaatagggcggaatgcatccagagaggggtgtccccatcacaggcacaggggctgggctccaacctcgtcacggaggtgcgtgtctacaactggtttgccaaccggcgcaaagaagaagccttccggcacaagctggccatggacacgtacagcgggccccccccagggccaggcccgggacctgcgctgcccgctcacagctcccctggcctgcctccacctgccctctcccccagtaaggtccacggtgtgcgctatggacagcctgcgaccagtgagactgcagaagtaccctcaagcagcggcggtcccttagtgacagtgtctacacccctccaccaagtgtcccccacgggcctggagcccagccacagcctgctgagtacagaagccaagctggtctcagcagctgggggccccctcccccctgtcagcaccctgacagcactgcacagcttggagcagacatccccaggcctcaaccagcagccccagaacctcatcatggcctcacttcctggggtcatgaccatcgggcctggtgagcctgcctccctgggtcctacgttcaccaacacaggtgcctccaccctggtcatcggcctggcctccacgcaggcacagagtgtgccggtcatcaacagcatgggcagcagcctgaccaccctgcagcccgtccagttctcccagccgctgcacccctcctaccagcagccgctcatgccacctgtgcagagccatgtgacccagagccccttcatggccaccatggctcagctgcagagcccccacgccctctacagccacaagcccgaggtggcccagtacacccacacgggcctgctcccgcagactatgctcatcaccgacaccaccaacctgagcgccctggccagcctcacgcccaccaagcaggtcttcacctcagacactgaggcctccagtgagtccgggcttcacacgccggcatctcaggccaccaccctccacgtccccagccaggaccctgccagcatccagcacctgcagccggcccaccggctcagcgccagccccacagtgtcctccagcagcctggtgctgtaccagagctcagactccagcaatggccagagccacctgctgccatccaaccacagcgtcatcgagaccttcatctccacccagatggcctcttcctcccagtaaggactagtccctgttcccagagcccacttttttttctttttttgaaataaaatagcctgtctttcagatctcaaaggctcttttcagagccaccaaaaaaaaaaaaaaaaaaaaaaaaaaaaaaaaaaaaaaaaaaaaaaaaaaaaaaaaaaaaaaaaaaaaaaaaaaaaaaaaaaaaaaaaaaaaaaaaaaaaa

SEQ ID NO: 5694 - RNA, 2168 nt, synthetic construct
  misc_feature 1..2168: note = mRNA a-1 (hSL-A100) (wt mod) from Homo sapiens__NP_000536.6__HNF1A(1-631)
  source 1..2168: mol_type = other RNA
aggagagtcccgcagtcggcgtccagcggctctgcttgttcgtgtgtgtgtcgttgcaggccttattcaagcttaccatggtttctaaactgagccagctgcagacggagctcctggcggccctgctcgagtcagggctgagcaaagaggcactgatccaggcactgggtgagccggggccctacctcctggctggagaaggccccctggacaagggggagtcctgcggcggcggtcgaggggagctggctgagctgcccaatgggctgggggagactcggggctccgaggacgagacggacgacgatggggaagacttcacgccacccatcctcaaagagctggagaacctcagccctgaggaggcggcccaccagaaagccgtggtggagacccttctgcaggaggacccgtggcgtgtggcgaagatggtcaagtcctacctgcagcagcacaacatcccacagcgggaggtggtcgataccactggcctcaaccagtcccacctgtcccaacacctcaacaagggcactcccatgaagacgcagaagcgggccgccctgtacacctggtacgtccgcaagcagcgagaggtggcgcagcagttcacccacgcagggcagggagggctgattgaggaacccacaggtgatgagctaccaaccaagaaggggcggaggaaccgtttcaagtggggcccagcatcccagcagatcctgttccaggcctatgagaggcagaagaaccctagcaaggaggagcgagagacgctagtggaggagtgcaatagggcggaatgcatccagagaggggtgtccccatcacaggcacaggggctgggctccaacctcgtcacggaggtgcgtgtctacaactggtttgccaaccggcgcaaagaagaagccttccggcacaagctggccatggacacgtacagcgggccacccccagggccaggcccgggacctgcgctgcccgctcacagctcccctggcctgcctccccctgccctctcccccagtaaggtccacggtgtgcgctatggacagcctgcgaccagtgagactgcagaagtaccctcaagcagcggcggtcccttagtgacagtgtctacacccctccaccaagtgtcccccacgggcctggagcccagccacagcctgctgagtacagaagccaagctggtctcagcagctgggggccccctgccccctgtcagcaccctgacagcactgcacagcttggagcagacatccccaggcctcaaccagcagccccagaacctcatcatggcctcacttcctggggtcatgaccatcgggcctggtgagcctgcctccctgggtcctacgttcaccaacacaggtgcctccaccctggtcatcggcctggcctccacgcaggcacagagtgtgccggtcatcaacagcatgggcagcagcctgaccaccctgcagcccgtccagttctcccagccgctgcacccctcctaccagcagccgctcatgccacctgtgcagagccatgtgacccagagccccttcatggccaccatggctcagctgcagagcccccacgccctctacagccacaagcccgaggtggcccagtacacccacacgggcctgctcccgcagactatgctcatcaccgacaccaccaacctgagcgccctggccagcctcacgcccaccaagcaggtcttcacctcagacactgaggcctccagtgagtccgggcttcacacgccggcatctcaggccaccaccctccacgtccccagccaggaccctgccagcatccagcacctccagccggcccaccggctcagcgccagccccacagtgtcctccagcagcctggtgctgtaccagagctcagactccagcaatggccagagccatctgctgccatccaaccacagcgtcatcgagaccttcatctccacccagatggcctcttcctcccagtgaggactagtccctgttcccagagcccacttttttttctttttttgaaataaaatagcctgtctttcagatctcaaaggctcttttcagagccaccaaaaaaaaaaaaaaaaaaaaaaaaaaaaaaaaaaaaaaaaaaaaaaaaaaaaaaaaaaaaaaaaaaaaaaaaaaaaaaaaaaaaaaaaaaaaaaaaaaaaa

SEQ ID NO: 5695 - RNA, 2168 nt, synthetic construct
  misc_feature 1..2168: note = mRNA a-1 (hSL-A100) (opt1) from Homo sapiens__NP_000536.6__HNF1A(1-631) R11128
  source 1..2168: mol_type = other RNA
aggagagtcccgcagtcggcgtccagcggctctgcttgttcgtgtgtgtgtcgttgcaggccttattcaagcttaccatggtgagcaagctgtcccagctgcagaccgagctgctggccgccctcctggagagcggcctgtccaaggaggcgctcatccaggccctgggggagcccggcccgtacctgctcgccggggagggccccctggacaagggggagagctgcggcggcgggcgcggcgagctggccgagctccccaacgggctgggcgagacccgggggtccgaggacgagacggacgacgacggcgaggacttcacgcccccgatcctgaaggagctcgagaacctgagccccgaggaggccgcgcaccagaaggccgtcgtggagaccctgctccaggaggacccctggcgcgtggccaagatggtcaagtcctacctgcagcagcacaacatcccccagcgggaggtggtggacaccaccggcctgaaccagagccacctctcccagcacctgaacaaggggaccccgatgaagacccagaagcgcgccgcgctgtacacctggtacgtccggaagcagcgcgaggtggcccagcagttcacgcacgccggccagggcggcctcatcgaggagcccaccggcgacgagctgcccaccaagaaggggcggcgcaaccggttcaagtggggccccgccagccagcagatcctgttccaggcctacgagcgccagaagaacccgtccaaggaggagcgggagaccctcgtggaggagtgcaaccgcgcggagtgcatccagcgcggggtcagcccctcccaggcccagggcctggggagcaacctggtgacggaggtgcgggtctacaactggttcgccaaccggcgcaaggaggaggccttccggcacaagctcgccatggacacctactccgggcccccgcccggccccgggcccggccccgcgctgccggcccacagctcccccgggctgcccccgcccgccctcagcccctccaaggtgcacggcgtgcgctacgggcagcccgccaccagcgagaccgccgaggtccccagctccagcggcggcccgctggtgacggtgtccacgcccctgcaccaggtcagccccaccgggctcgagccgtcccacagcctgctgtccaccgaggcgaagctcgtgagcgccgccggcgggcccctgccgcccgtgtccaccctgaccgccctccacagcctggagcagacctcccccggcctgaaccagcagccccagaacctcatcatggccagcctgcccggggtcatgaccatcggccccggcgagccggcgtccctggggcccacgttcaccaacaccggcgccagcaccctggtgatcgggctcgcctccacgcaggcccagagcgtgcccgtcatcaactccatgggcagctccctgaccaccctgcagcccgtgcagttcagccagccgctccaccccagctaccagcagcccctgatgcccccggtccagtcccacgtgacccagagccccttcatggcgacgatggcccagctgcagagcccccacgccctctactcccacaagcccgaggtggcccagtacacccacaccggcctgctgccgcagaccatgctcatcacggacaccaccaacctgtccgccctggcgagcctcacccccaccaagcaggtcttcacgtccgacaccgaggccagctccgagagcgggctgcacacccccgcctcccaggccaccacgctgcacgtgcccagccaggacccggcctccatccagcacctccagcccgcgcaccggctgagcgcctcccccaccgtgagctccagcagcctggtcctctaccagtccagcgactccagcaacggccagtcccacctcctgccgagcaaccactccgtgatcgagaccttcatcagcacccagatggcctccagctcccagtgaggactagtccctgttcccagagcccacttttttttctttttttgaaataaaatagcctgtctttcagatctcaaaggctcttttcagagccaccaaaaaaaaaaaaaaaaaaaaaaaaaaaaaaaaaaaaaaaaaaaaaaaaaaaaaaaaaaaaaaaaaaaaaaaaaaaaaaaaaaaaaaaaaaaaaaaaaaaaa

SEQ ID NO: 5696 - RNA, 2168 nt, synthetic construct
  misc_feature 1..2168: note = mRNA a-1 (hSL-A100) (opt2) from Homo sapiens__NP_000536.6__HNF1A(1-631)
  source 1..2168: mol_type = other RNA
aggagagtcccgcagtcggcgtccagcggctctgcttgttcgtgtgtgtgtcgttgcaggccttattcaagcttaccatggtctccaagctctcccagctccagaccgagctcctcgccgccctcctcgagtccggcctctccaaggaggccctcatccaggccctcggcgagcccggcccctacctcctcgccggcgagggccccctcgacaagggcgagtcctgcggcggcggccgcggcgagctcgccgagctccccaacggcctcggcgagacccgcggctccgaggacgagaccgacgacgacggcgaggacttcaccccccccatcctcaaggagctcgagaacctctcccccgaggaggccgcccaccagaaggccgtcgtcgagaccctcctccaggaggacccctggcgcgtcgccaagatggtcaagtcctacctccagcagcacaacatcccccagcgcgaggtcgtcgacaccaccggcctcaaccagtcccacctctcccagcacctcaacaagggcacccccatgaagacccagaagcgcgccgccctctacacctggtacgtccgcaagcagcgcgaggtcgcccagcagttcacccacgccggccagggcggcctcatcgaggagcccaccggcgacgagctccccaccaagaagggccgccgcaaccgcttcaagtggggccccgcctcccagcagatcctcttccaggcctacgagcgccagaagaacccctccaaggaggagcgcgagaccctcgtcgaggagtgcaaccgcgccgagtgcatccagcgcggcgtctccccctcccaggcccagggcctcggctccaacctcgtcaccgaggtccgcgtctacaactggttcgccaaccgccgcaaggaggaggccttccgccacaagctcgccatggacacctactccggccccccccccggccccggccccggccccgccctccccgcccactcctcccccggcctccccccccccgccctctccccctccaaggtccacggcgtccgctacggccagcccgccacctccgagaccgccgaggtcccctcctcctccggcggccccctcgtcaccgtctccacccccctccaccaggtctcccccaccggcctcgagccctcccactccctcctctccaccgaggccaagctcgtctccgccgccggcggccccctcccccccgtctccaccctcaccgccctccactccctcgagcagacctcccccggcctcaaccagcagccccagaacctcatcatggcctccctccccggcgtcatgaccatcggccccggcgagcccgcctccctcggccccaccttcaccaacaccggcgcctccaccctcgtcatcggcctcgcctccacccaggcccagtccgtccccgtcatcaactccatgggctcctccctcaccaccctccagcccgtccagttctcccagcccctccacccctcctaccagcagcccctcatgccccccgtccagtcccacgtcacccagtcccccttcatggccaccatggcccagctccagtccccccacgccctctactcccacaagcccgaggtcgcccagtacacccacaccggcctcctcccccagaccatgctcatcaccgacaccaccaacctctccgccctcgcctccctcacccccaccaagcaggtcttcacctccgacaccgaggcctcctccgagtccggcctccacacccccgcctcccaggccaccaccctccacgtcccctcccaggaccccgcctccatccagcacctccagcccgcccaccgcctctccgcctcccccaccgtctcctcctcctccctcgtcctctaccagtcctccgactcctccaacggccagtcccacctcctcccctccaaccactccgtcatcgagaccttcatctccacccagatggcctcctcctcccagtgaggactagtccctgttcccagagcccacttttttttctttttttgaaataaaatagcctgtctttcagatctcaaaggctcttttcagagccaccaaaaaaaaaaaaaaaaaaaaaaaaaaaaaaaaaaaaaaaaaaaaaaaaaaaaaaaaaaaaaaaaaaaaaaaaaaaaaaaaaaaaaaaaaaaaaaaaaaaaa

SEQ ID NO: 5697 - RNA, 2168 nt, synthetic construct
  misc_feature 1..2168: note = mRNA a-1 (hSL-A100) (opt3) from Homo sapiens__NP_000536.6__HNF1A(1-631)
  source 1..2168: mol_type = other RNA
aggagagtcccgcagtcggcgtccagcggctctgcttgttcgtgtgtgtgtcgttgcaggccttattcaagcttaccatggtgagcaagctgtcccagctccaaaccgagcttctggccgctttgttagaatctggcctgtcaaaagaggcactaatccaggccctcggggaacccggaccttacctgcttgcgggtgagggcccactggacaagggggaaagttgcggaggcggtagaggggagttggctgagctcccgaacggactgggcgaaacaaggggcagcgaggatgaaactgacgatgacggggaggatttcacgccccctattctgaaagagctcgaaaatttatccccagaggaagccgcacaccagaaggccgtcgttgagaccctgcttcaggaagacccctggcgggtggctaaaatggtaaagtcttatttgcaacagcataacatacctcagcgcgaggtggtcgatacaactggactgaatcagtcgcacctatcacaacatctcaacaagggtaccccaatgaaaacacagaagcgagcagccctgtacacctggtatgtgcgtaaacagagagaggttgctcagcaatttactcacgccggccaagggggacttatcgaggaacccacaggcgacgaactgcctaccaagaaaggtaggcggaatcgcttcaagtgggggccagcgagccagcagattttgtttcaggcatacgagagacagaagaacccgagtaaagaagagagggagacgctcgtggaagagtgtaatcgggccgaatgcatccagcgcggagtctccccctctcaagctcagggcctgggcagcaacttagtgactgaggtacgagtttataattggttcgccaacagaaggaaggaagaggcatttcggcataaactggctatggatacctactccgggcctccacccggacctggtccaggccccgccctcccggcgcactcaagtcctgggcttccccctccagccctgagcccctctaaggtgcacggagtccgttatggccagccagcaacatccgagactgctgaagtgccctcaagcagtggtgggcctttggtgaccgtctctacaccactacatcaggtttccccgaccggcctggagcccagccactcgctcctgtctacggaagccaaacttgtgtccgctgccggaggccctctgccacccgtatcaactttgacagcactccatagtctggagcaaaccagccctgggttaaatcagcagccacagaacctgattatggcctccctacccggagtgatgactatcggtccgggcgagcctgcttctctcgggccaacattcaccaatacgggagcgagcaccctggtcataggccttgcatcaacacaagcccagagtgtgcccgttatcaactccatgggtagctctttgactaccctgcagcctgtgcagttttcacaacccctccacccaagttaccagcagcctctgatgcccccagtccaaagccacgtgacacagtccccgttcatggctactatggcccagcttcagtctcctcatgcactgtactcgcacaagcccgaagtagcccaatatacccatacagggttgctcccacagaccatgctgattactgacacgacaaatttaagcgctctggcctccctaacccccactaaacaggtttttacctcagatacagaggcaagttctgaaagcggcctccacacccctgcgtcccaggctactacactgcatgtgccatcacaagaccccgccagcatccagcaccttcagcctgcacaccgcttgtctgcctccccgacggtcagttctagctccctggtgctctaccagtcaagtgatagctcgaacggacaatcccatctgttaccatctaaccacagcgtcattgagaccttcatctcaactcagatggctagttcctctcagtgaggactagtccctgttcccagagcccacttttttttctttttttgaaataaaatagcctgtctttcagatctcaaaggctcttttcagagccaccaaaaaaaaaaaaaaaaaaaaaaaaaaaaaaaaaaaaaaaaaaaaaaaaaaaaaaaaaaaaaaaaaaaaaaaaaaaaaaaaaaaaaaaaaaaaaaaaaaaaa

SEQ ID NO: 5698 - RNA, 2168 nt, synthetic construct
  misc_feature 1..2168: note = mRNA a-1 (hSL-A100) (opt4) from Homo sapiens__NP_000536.6__HNF1A(1-631)
  source 1..2168: mol_type = other RNA
aggagagtcccgcagtcggcgtccagcggctctgcttgttcgtgtgtgtgtcgttgcaggccttattcaagcttaccatggtgagcaagctgagccagctgcagaccgagctgctggccgccctgctggagagcggcctgagcaaggaggccctgatccaggccctgggcgagcccggcccctacctgctggccggcgagggccccctggacaagggcgagagctgcggcggcggcagaggcgagctggccgagctgcccaacggcctgggcgagaccagaggcagcgaggacgagaccgacgacgacggcgaggacttcaccccccccatcctgaaggagctggagaacctgagccccgaggaggccgcccaccagaaggccgtggtggagaccctgctgcaggaggacccctggagagtggccaagatggtgaagagctacctgcagcagcacaacatcccccagagagaggtggtggacaccaccggcctgaaccagagccacctgagccagcacctgaacaagggcacccccatgaagacccagaagagagccgccctgtacacctggtacgtgagaaagcagagagaggtggcccagcagttcacccacgccggccagggcggcctgatcgaggagcccaccggcgacgagctgcccaccaagaagggcagaagaaacagattcaagtggggccccgccagccagcagatcctgttccaggcctacgagagacagaagaaccccagcaaggaggagagagagaccctggtggaggagtgcaacagagccgagtgcatccagagaggcgtgagccccagccaggcccagggcctgggcagcaacctggtgaccgaggtgagagtgtacaactggttcgccaacagaagaaaggaggaggccttcagacacaagctggccatggacacctacagcggccccccccccggccccggccccggccccgccctgcccgcccacagcagccccggcctgcccccccccgccctgagccccagcaaggtgcacggcgtgagatacggccagcccgccaccagcgagaccgccgaggtgcccagcagcagcggcggccccctggtgaccgtgagcacccccctgcaccaggtgagccccaccggcctggagcccagccacagcctgctgagcaccgaggccaagctggtgagcgccgccggcggccccctgccccccgtgagcaccctgaccgccctgcacagcctggagcagaccagccccggcctgaaccagcagccccagaacctgatcatggccagcctgcccggcgtgatgaccatcggccccggcgagcccgccagcctgggccccaccttcaccaacaccggcgccagcaccctggtgatcggcctggccagcacccaggcccagagcgtgcccgtgatcaacagcatgggcagcagcctgaccaccctgcagcccgtgcagttcagccagcccctgcaccccagctaccagcagcccctgatgccccccgtgcagagccacgtgacccagagccccttcatggccaccatggcccagctgcagagcccccacgccctgtacagccacaagcccgaggtggcccagtacacccacaccggcctgctgccccagaccatgctgatcaccgacaccaccaacctgagcgccctggccagcctgacccccaccaagcaggtgttcaccagcgacaccgaggccagcagcgagagcggcctgcacacccccgccagccaggccaccaccctgcacgtgcccagccaggaccccgccagcatccagcacctgcagcccgcccacagactgagcgccagccccaccgtgagcagcagcagcctggtgctgtaccagagcagcgacagcagcaacggccagagccacctgctgcccagcaaccacagcgtgatcgagaccttcatcagcacccagatggccagcagcagccagtgaggactagtccctgttcccagagcccacttttttttctttttttgaaataaaatagcctgtctttcagatctcaaaggctcttttcagagccaccaaaaaaaaaaaaaaaaaaaaaaaaaaaaaaaaaaaaaaaaaaaaaaaaaaaaaaaaaaaaaaaaaaaaaaaaaaaaaaaaaaaaaaaaaaaaaaaaaaaaa

SEQ ID NO: 5699 - RNA, 2168 nt, synthetic construct
  misc_feature 1..2168: note = mRNA a-1 (hSL-A100) (opt5) from Homo sapiens__NP_000536.6__HNF1A(1-631)
  source 1..2168: mol_type = other RNA
aggagagtcccgcagtcggcgtccagcggctctgcttgttcgtgtgtgtgtcgttgcaggccttattcaagcttaccatggtgagcaagctgtcccagctccaaaccgagctgcttgccgctctgctcgaatctggcctgagcaaagaggcccttatccaggcgctgggggaacccggaccttacctcctggctggcgaggggccgctggacaagggagaatcctgcggcgggggaagaggcgagctcgccgagctgcccaacggccttggggaaacacggggatctgaggatgaaacggacgatgacggcgaggatttcacccctcccattctgaaagagctcgaaaatctgagccctgaggaagccgctcaccagaaggccgtcgttgagacacttctgcaggaagacccctggcgcgtggctaaaatggtgaagtcctatctccaacagcataacatccctcagagagaggtcgtggataccacagggctgaatcagtctcacctgagccaacatctcaacaagggaaccccgatgaaaacacagaagcgggccgcgctgtacacctggtatgttcgcaaacagagagaggtggcccagcaatttacgcacgctggccaagggggacttattgaagaacccaccggcgacgaactgcctacaaagaaaggccggcgcaatagattcaagtgggggcccgcctcccagcagatcctctttcaggcttacgagcggcagaagaaccctagcaaagaggagcgcgagaccctggtcgaagagtgtaatagagccgaatgcattcagcggggagtgtctccctcccaagcgcagggccttgggagcaacctggttacagaggtgcgcgtctataattggttcgccaacagacggaaggaagaggcttttcgccataaactcgccatggatacctactctggaccgcctcccggccctgggcccggacccgctctgcctgcccactccagcccgggcctgccccctcccgccctctctccttccaaggtgcacggcgtgagatatgggcagcccgctacgagcgagacagcggaagtcccgtcctctagcggaggccctctggttaccgtgtccacaccccttcatcaggtgagccctaccgggctggagccctctcactccctcctgagcaccgaagccaaacttgtctctgctgccggaggccctctgcccccggtgagcacactcacggccctgcattccctggagcaaacctctcctgggctcaatcagcagccccagaacctgatcatggctagccttcccggcgttatgacaatcggacctggcgagccggcctccctggggcccaccttcacaaataccggagcgagcacgctcgtgattggcctggcttctacacaagcccagtccgtccctgtgatcaacagcatggggtcttccctgaccacccttcagcccgttcagtttagccaacctctccacccctcctaccagcagcctctgatgcccccggtgcaatctcacgtcacacagagccctttcatggccaccatggctcagctgcagagcccccatgccctctactctcacaagcctgaagtggctcaatatacacatacgggactgcttccccagaccatgctgattacagacaccacaaatctcagcgccctggcgtccctgaccccgacgaaacaggtctttaccagcgatacagaggcctcttccgaaagcggccttcacacccctgcttctcaggccacaaccctccatgtgccctcccaagaccctgctagcatccagcatctgcagcccgcccaccggctgtctgcgagccccacggtttcctcctcttccctcgtgctgtaccagagctccgattctagcaacgggcaatcccaccttctgccttctaaccacagcgtcattgagacattcatctccacccagatggcctctagctcccagtgaggactagtccctgttcccagagcccacttttttttctttttttgaaataaaatagcctgtctttcagatctcaaaggctcttttcagagccaccaaaaaaaaaaaaaaaaaaaaaaaaaaaaaaaaaaaaaaaaaaaaaaaaaaaaaaaaaaaaaaaaaaaaaaaaaaaaaaaaaaaaaaaaaaaaaaaaaaaaa

SEQ ID NO: 5700 - RNA, 2168 nt, synthetic construct
  misc_feature 1..2168: note = mRNA a-1 (hSL-A100) (opt11) from Homo sapiens__NP_000536.6__HNF1A(1-631)
  source 1..2168: mol_type = other RNA
aggagagtcccgcagtcggcgtccagcggctctgcttgttcgtgtgtgtgtcgttgcaggccttattcaagcttaccatggtatccaaactctcccaactccaaaccgaacttctcgcagcccttctagagagcggcctttccaaagaagccctgatacaagcactcggagaacccggcccatacctcctcgccggcgagggccctttagacaaaggtgaatcctgcggtggtggtcgtggagaactagctgaactaccgaacggcttaggcgaaacccgaggctccgaagatgaaaccgacgacgatggtgaggacttcacacccccaatactaaaagaactagaaaacctctcacccgaagaagccgctcaccaaaaagccgttgtagaaaccctactccaagaagacccctggcgagtagcgaaaatggtaaaatcatacctccaacaacacaacatcccccaacgcgaagtcgtcgacacaaccggcctaaaccaatcccacctctcccaacacctcaacaaaggcacaccaatgaaaacacaaaaacgcgcagccctctacacatggtacgtacgaaaacaacgcgaagtcgcccaacaattcacacacgccggacaaggaggactaatcgaagaacccaccggcgacgaactacctacaaagaaaggccgccgaaaccgtttcaaatggggccccgcctcacaacaaatcctattccaagcctacgaacgccagaaaaaccccagcaaagaagaacgagaaaccctcgtcgaagaatgcaatcgcgcggagtgcattcaacgaggcgtctctccctcccaagcccaaggacttggctccaacctcgtcaccgaagtgagagtctacaactggttcgccaaccgtcgcaaagaagaagccttccgacataaactcgctatggacacatactcaggcccacctcccggccccggccccggtcccgcactccccgcgcactcatcccctggcctacccccacccgccctctcaccgtccaaagttcacggagtacgctacggccaaccggctacctcagaaacagcagaagtcccttcctcctccggcggcccactcgtcaccgtaagcactcccctacaccaagtatcacccaccggcctcgaaccatcccactccttgctgtcaacagaagccaaacttgtctcagcggccggtggaccactgccacccgtctccaccctcaccgcactccactcactcgaacaaaccagcccaggcctgaaccaacaaccccaaaacctaattatggcatcacttcccggagtcatgactattggacccggcgaaccagcatcattaggcccgacattcaccaacacaggagcttccaccctcgtcataggactagcctccacacaagctcaatccgtacccgttatcaactccatgggctcatccctcacaaccctacaacccgtacaattttcccagcccctacacccatcctaccaacaacccctaatgcctcccgtccaatcccatgtaactcaatcccccttcatggccaccatggcccaactccaatcaccccacgcactctactcccacaagccagaagtcgctcaatacacccacaccggactcctaccccagaccatgctaataaccgataccacaaacctctcagccctcgcctcactcactccaaccaaacaagtcttcaccagcgacaccgaagcctcatcagaatccggcctccatacccccgcctctcaagccaccacactacacgtcccatcgcaagaccccgcctccatccaacacttacaacccgcacaccgtctctcagcctcacctaccgtctcatcatccagtctagtcctataccaatcatctgactcctcaaacggccaatcccacctccttccttcaaaccactcagttatcgaaacgttcatctccactcaaatggcctcatccagccaataaggactagtccctgttcccagagcccacttttttttctttttttgaaataaaatagcctgtctttcagatctcaaaggctcttttcagagccaccaaaaaaaaaaaaaaaaaaaaaaaaaaaaaaaaaaaaaaaaaaaaaaaaaaaaaaaaaaaaaaaaaaaaaaaaaaaaaaaaaaaaaaaaaaaaaaaaaaaaa

SEQ ID NO: 5701 - RNA, 2168 nt, synthetic construct
  misc_feature 1..2168: note = mRNA a-1 (hSL-A100) (opt28) from Homo sapiens__NP_000536.6__HNF1A(1-631)
  source 1..2168: mol_type = other RNA
aggagagtcccgcagtcggcgtccagcggctctgcttgttcgtgtgtgtgtcgttgcaggccttattcaagcttaccatggtgagcaagctgtcccagctgcagaccgagctgctggcagccctgctggaatctggactgtcaaaagaggctctgatccaggcactgggcgaaccagggccctacctgctggccggagagggccctctggacaagggggaaagttgcggaggcggacggggcgagctggctgaactgccaaacgggctgggagagacaaggggcagcgaggatgaaactgacgatgacggggaggacttcacaccccctattctgaaagaactggagaatctgtccccagaagaggcagcccaccagaaggctgtcgtggaaaccctgctgcaggaggatccctggagagtggcaaagatggtcaaatcttatctgcagcagcacaacatccctcagcgcgaagtggtggacactaccggactgaatcagagccacctgtcacagcatctgaacaagggcacaccaatgaaaactcagaagcgagccgctctgtacacctggtacgtccggaagcagagggaggtggcacagcagtttacacacgccgggcagggaggcctgatcgaggaacccaccggagacgagctgcctactaaaaaggggagacgcaatcggttcaaatggggcccagcaagtcagcagattctgtttcaggcttatgaaaggcagaagaacccctccaaggaggaaagagagacactggtggaagagtgcaatcgagccgagtgtatccagcggggagtcagcccttctcaggcacagggcctggggagcaacctggtgaccgaagtgcgcgtctacaactggttcgctaataggagaaaagaggaagcctttcggcataagctggcaatggatacttactccggaccaccccctggcccaggacccgggcctgctctgccagcccactcaagtcccggcctgcctccacccgcactgagcccttctaaagtgcacggagtgcgatatggccagccagctacctccgagacagccgaagtccccagctcaagtgggggacctctggtgaccgtgtctactccactgcatcaggtctcccccacaggcctggagcctagccacagcctgctgtccaccgaagcaaagctggtgtcagccgctggagggccactgcccccagtgtctacactgactgcactgcatagtctggagcagaccagccctggcctgaaccagcagccccagaatctgattatggcctccctgccaggagtcatgacaatcgggcctggcgaacccgcatctctgggaccaactttcaccaacacaggcgctagcaccctggtgatcggactggcatcaactcaggcccagagtgtgcctgtcattaattccatggggagctctctgacaaccctgcagcccgtgcagttcagccagccactgcacccttcctaccagcagcccctgatgccacctgtccaatcacacgtgactcagagtccctttatggctaccatggcacagctgcagagcccacatgccctgtactctcacaaacctgaggtggctcagtatacacataccggcctgctgccccagactatgctgatcacagacaccacaaacctgtccgcactggccagcctgactccaaccaagcaggtcttcacatcagatactgaggctagttccgaatctggactgcacacccctgcaagccaggccacaaccctgcatgtgccctcacaggacccagcaagcatccagcatctgcagcctgctcacaggctgtccgccagtcccactgtgtctagctcctcactggtcctgtaccagtctagcgacagttccaatgggcagagccatctgctgccatctaaccactcagtgattgagacctttatcagcacacagatggcatccagtagccagtgaggactagtccctgttcccagagcccacttttttttctttttttgaaataaaatagcctgtctttcagatctcaaaggctcttttcagagccaccaaaaaaaaaaaaaaaaaaaaaaaaaaaaaaaaaaaaaaaaaaaaaaaaaaaaaaaaaaaaaaaaaaaaaaaaaaaaaaaaaaaaaaaaaaaaaaaaaaaaa

SEQ ID NO: 5702 - RNA, 2168 nt, synthetic construct
  misc_feature 1..2168: note = mRNA a-1 (hSL-A100) (opt29) from Homo sapiens__NP_000536.6__HNF1A(1-631)
  source 1..2168: mol_type = other RNA
aggagagtcccgcagtcggcgtccagcggctctgcttgttcgtgtgtgtgtcgttgcaggccttattcaagcttaccatggtgagcaagctgagccagctgcagaccgagctgctggccgccctgctggaatctggcctgagcaaggaggccctgatccaggccctgggcgaacctggcccctacctgctggccggagagggccctctggacaagggcgaaagctgcggcggcggccggggcgagctggccgaactccccaacggcctgggggagaccagaggctccgaagacgagaccgatgacgacggcgaagacttcacacctccaatcctgaaggagctggagaacctgagccctgaagaggccgcccaccagaaggccgtggtggaaaccctgctgcaagaggacccctggcgggtggccaagatggtgaaaagctacctgcagcagcacaatatccctcagagagaagtggtggataccaccggcctgaaccagagccatctgagccagcacctgaacaagggaacccctatgaagacccagaagcgggccgctctgtacacatggtacgtgagaaagcaacgggaggtggcccagcagtttacccacgccggccagggcggcctgatcgaggaacccaccggcgacgaactgcctaccaagaagggcagacggaacagattcaagtggggcccggcctctcagcagatcctgttccaggcctacgagcggcagaagaaccctagcaaggaagagagagagaccctggtggaagagtgcaaccgggccgaatgtatccagagaggcgtgagccccagccaagcccagggactgggctccaatctggtgaccgaggtgcgggtgtacaactggtttgccaacagacggaaggaagaggccttcagacacaagctggccatggacacctacagcggccctccccctggccctggccccggccctgccctgccagcccacagcagccctggcctgccccctcctgcactgtctcccagcaaggtgcacggcgtgcggtacggacagcctgccacaagcgaaaccgccgaggtgcccagctccagcggcggccctctggtgaccgtgagcacccctctgcatcaggtgagccccaccggcctggaaccttctcacagcctgctcagcaccgaggccaagctggtgagcgccgccggcggccccctgcctccagtgagcaccctgacagccctgcactccctggaacagaccagccctggcctgaaccagcagccccagaacctgatcatggccagcctgcctggcgtgatgaccatcgggcctggcgagcccgcctctctgggccctaccttcaccaacaccggcgccagcacactggtgatcggactggccagcacccaagcccagagcgtgccggtgatcaatagcatgggctctagcctgaccaccctgcagcctgtgcagttcagccagcccctgcacccttcctaccagcagcccctgatgcctcctgtgcaaagccacgtgacccagagcccctttatggccaccatggcccagctgcagagccctcacgccctgtacagccataaaccagaggtggcccagtacacccacacaggcctgctgcctcagaccatgctgatcaccgacaccaccaacctgtctgccctggccagcctgacccccaccaaacaggtgttcacaagcgataccgaagccagctccgagagcggcctgcacacccctgccagccaggccaccaccctgcacgtgcctagccaagaccccgcctctatccagcacctccagcctgcccacagactgagcgctagccccaccgtgagctccagcagcctggtgctgtaccagagctctgacagcagcaacggccagagccatctgctgcctagcaaccactccgtgatcgaaaccttcattagcacacagatggccagctctagccagtgaggactagtccctgttcccagagcccacttttttttctttttttgaaataaaatagcctgtctttcagatctcaaaggctcttttcagagccaccaaaaaaaaaaaaaaaaaaaaaaaaaaaaaaaaaaaaaaaaaaaaaaaaaaaaaaaaaaaaaaaaaaaaaaaaaaaaaaaaaaaaaaaaaaaaaaaaaaaaa

SEQ ID NO: 5703 - RNA, 2144 nt, synthetic construct
  misc_feature 1..2144: note = mRNA a-1 (A100) (wt) from Homo sapiens__NP_000536.6__HNF1A(1-631)
  source 1..2144: mol_type = other RNA
aggagagtcccgcagtcggcgtccagcggctctgcttgttcgtgtgtgtgtcgttgcaggccttattcaagcttaccatggtttctaaactgagccagctgcagacggagctcctggcggccctgctcgagtcagggctgagcaaagaggcactgatccaggcactgggtgagccggggccctacctcctggctggagaaggccccctggacaagggggagtcctgcggcggcggtcgaggggagctggctgagctgcccaatgggctgggggagactcggggctccgaggacgagacggacgacgatggggaagacttcacgccacccatcctcaaagagctggagaacctcagccctgaggaggcggcccaccagaaagccgtggtggagacccttctgcaggaggacccgtggcgtgtggcgaagatggtcaagtcctacctgcagcagcacaacatcccacagcgggaggtggtcgataccactggcctcaaccagtcccacctgtcccaacacctcaacaagggcactcccatgaagacgcagaagcgggccgccctgtacacctggtacgtccgcaagcagcgagaggtggcgcagcagttcacccatgcagggcagggagggctgattgaagagcccacaggtgatgagctaccaaccaagaaggggcggaggaaccgtttcaagtggggcccagcatcccagcagatcctgttccaggcctatgagaggcagaagaaccctagcaaggaggagcgagagacgctagtggaggagtgcaatagggcggaatgcatccagagaggggtgtccccatcacaggcacaggggctgggctccaacctcgtcacggaggtgcgtgtctacaactggtttgccaaccggcgcaaagaagaagccttccggcacaagctggccatggacacgtacagcgggccccccccagggccaggcccgggacctgcgctgcccgctcacagctcccctggcctgcctccacctgccctctcccccagtaaggtccacggtgtgcgctatggacagcctgcgaccagtgagactgcagaagtaccctcaagcagcggcggtcccttagtgacagtgtctacacccctccaccaagtgtcccccacgggcctggagcccagccacagcctgctgagtacagaagccaagctggtctcagcagctgggggccccctcccccctgtcagcaccctgacagcactgcacagcttggagcagacatccccaggcctcaaccagcagccccagaacctcatcatggcctcacttcctggggtcatgaccatcgggcctggtgagcctgcctccctgggtcctacgttcaccaacacaggtgcctccaccctggtcatcggcctggcctccacgcaggcacagagtgtgccggtcatcaacagcatgggcagcagcctgaccaccctgcagcccgtccagttctcccagccgctgcacccctcctaccagcagccgctcatgccacctgtgcagagccatgtgacccagagccccttcatggccaccatggctcagctgcagagcccccacgccctctacagccacaagcccgaggtggcccagtacacccacacgggcctgctcccgcagactatgctcatcaccgacaccaccaacctgagcgccctggccagcctcacgcccaccaagcaggtcttcacctcagacactgaggcctccagtgagtccgggcttcacacgccggcatctcaggccaccaccctccacgtccccagccaggaccctgccagcatccagcacctgcagccggcccaccggctcagcgccagccccacagtgtcctccagcagcctggtgctgtaccagagctcagactccagcaatggccagagccacctgctgccatccaaccacagcgtcatcgagaccttcatctccacccagatggcctcttcctcccagtaaggactagtccctgttcccagagcccacttttttttctttttttgaaataaaatagcctgtctttcagatctaaaaaaaaaaaaaaaaaaaaaaaaaaaaaaaaaaaaaaaaaaaaaaaaaaaaaaaaaaaaaaaaaaaaaaaaaaaaaaaaaaaaaaaaaaaaaaaaaaaa

SEQ ID NO: 5704 - RNA, 2144 nt, synthetic construct
  misc_feature 1..2144: note = mRNA a-1 (A100) (wt mod) from Homo sapiens__NP_000536.6__HNF1A(1-631)
  source 1..2144: mol_type = other RNA
aggagagtcccgcagtcggcgtccagcggctctgcttgttcgtgtgtgtgtcgttgcaggccttattcaagcttaccatggtttctaaactgagccagctgcagacggagctcctggcggccctgctcgagtcagggctgagcaaagaggcactgatccaggcactgggtgagccggggccctacctcctggctggagaaggccccctggacaagggggagtcctgcggcggcggtcgaggggagctggctgagctgcccaatgggctgggggagactcggggctccgaggacgagacggacgacgatggggaagacttcacgccacccatcctcaaagagctggagaacctcagccctgaggaggcggcccaccagaaagccgtggtggagacccttctgcaggaggacccgtggcgtgtggcgaagatggtcaagtcctacctgcagcagcacaacatcccacagcgggaggtggtcgataccactggcctcaaccagtcccacctgtcccaacacctcaacaagggcactcccatgaagacgcagaagcgggccgccctgtacacctggtacgtccgcaagcagcgagaggtggcgcagcagttcacccacgcagggcagggagggctgattgaggaacccacaggtgatgagctaccaaccaagaaggggcggaggaaccgtttcaagtggggcccagcatcccagcagatcctgttccaggcctatgagaggcagaagaaccctagcaaggaggagcgagagacgctagtggaggagtgcaatagggcggaatgcatccagagaggggtgtccccatcacaggcacaggggctgggctccaacctcgtcacggaggtgcgtgtctacaactggtttgccaaccggcgcaaagaagaagccttccggcacaagctggccatggacacgtacagcgggccacccccagggccaggcccgggacctgcgctgcccgctcacagctcccctggcctgcctccccctgccctctcccccagtaaggtccacggtgtgcgctatggacagcctgcgaccagtgagactgcagaagtaccctcaagcagcggcggtcccttagtgacagtgtctacacccctccaccaagtgtcccccacgggcctggagcccagccacagcctgctgagtacagaagccaagctggtctcagcagctgggggccccctgccccctgtcagcaccctgacagcactgcacagcttggagcagacatccccaggcctcaaccagcagccccagaacctcatcatggcctcacttcctggggtcatgaccatcgggcctggtgagcctgcctccctgggtcctacgttcaccaacacaggtgcctccaccctggtcatcggcctggcctccacgcaggcacagagtgtgccggtcatcaacagcatgggcagcagcctgaccaccctgcagcccgtccagttctcccagccgctgcacccctcctaccagcagccgctcatgccacctgtgcagagccatgtgacccagagccccttcatggccaccatggctcagctgcagagcccccacgccctctacagccacaagcccgaggtggcccagtacacccacacgggcctgctcccgcagactatgctcatcaccgacaccaccaacctgagcgccctggccagcctcacgcccaccaagcaggtcttcacctcagacactgaggcctccagtgagtccgggcttcacacgccggcatctcaggccaccaccctccacgtccccagccaggaccctgccagcatccagcacctccagccggcccaccggctcagcgccagccccacagtgtcctccagcagcctggtgctgtaccagagctcagactccagcaatggccagagccatctgctgccatccaaccacagcgtcatcgagaccttcatctccacccagatggcctcttcctcccagtgaggactagtccctgttcccagagcccacttttttttctttttttgaaataaaatagcctgtctttcagatctaaaaaaaaaaaaaaaaaaaaaaaaaaaaaaaaaaaaaaaaaaaaaaaaaaaaaaaaaaaaaaaaaaaaaaaaaaaaaaaaaaaaaaaaaaaaaaaaaaaa

SEQ ID NO: 5705 - RNA, 2144 nt, synthetic construct
  misc_feature 1..2144: note = mRNA a-1 (A100) (opt1) from Homo sapiens__NP_000536.6__HNF1A(1-631)
  source 1..2144: mol_type = other RNA
aggagagtcccgcagtcggcgtccagcggctctgcttgttcgtgtgtgtgtcgttgcaggccttattcaagcttaccatggtgagcaagctgtcccagctgcagaccgagctgctggccgccctcctggagagcggcctgtccaaggaggcgctcatccaggccctgggggagcccggcccgtacctgctcgccggggagggccccctggacaagggggagagctgcggcggcgggcgcggcgagctggccgagctccccaacgggctgggcgagacccgggggtccgaggacgagacggacgacgacggcgaggacttcacgcccccgatcctgaaggagctcgagaacctgagccccgaggaggccgcgcaccagaaggccgtcgtggagaccctgctccaggaggacccctggcgcgtggccaagatggtcaagtcctacctgcagcagcacaacatcccccagcgggaggtggtggacaccaccggcctgaaccagagccacctctcccagcacctgaacaaggggaccccgatgaagacccagaagcgcgccgcgctgtacacctggtacgtccggaagcagcgcgaggtggcccagcagttcacgcacgccggccagggcggcctcatcgaggagcccaccggcgacgagctgcccaccaagaaggggcggcgcaaccggttcaagtggggccccgccagccagcagatcctgttccaggcctacgagcgccagaagaacccgtccaaggaggagcgggagaccctcgtggaggagtgcaaccgcgcggagtgcatccagcgcggggtcagcccctcccaggcccagggcctggggagcaacctggtgacggaggtgcgggtctacaactggttcgccaaccggcgcaaggaggaggccttccggcacaagctcgccatggacacctactccgggcccccgcccggccccgggcccggccccgcgctgccggcccacagctcccccgggctgcccccgcccgccctcagcccctccaaggtgcacggcgtgcgctacgggcagcccgccaccagcgagaccgccgaggtccccagctccagcggcggcccgctggtgacggtgtccacgcccctgcaccaggtcagccccaccgggctcgagccgtcccacagcctgctgtccaccgaggcgaagctcgtgagcgccgccggcgggcccctgccgcccgtgtccaccctgaccgccctccacagcctggagcagacctcccccggcctgaaccagcagccccagaacctcatcatggccagcctgcccggggtcatgaccatcggccccggcgagccggcgtccctggggcccacgttcaccaacaccggcgccagcaccctggtgatcgggctcgcctccacgcaggcccagagcgtgcccgtcatcaactccatgggcagctccctgaccaccctgcagcccgtgcagttcagccagccgctccaccccagctaccagcagcccctgatgcccccggtccagtcccacgtgacccagagccccttcatggcgacgatggcccagctgcagagcccccacgccctctactcccacaagcccgaggtggcccagtacacccacaccggcctgctgccgcagaccatgctcatcacggacaccaccaacctgtccgccctggcgagcctcacccccaccaagcaggtcttcacgtccgacaccgaggccagctccgagagcgggctgcacacccccgcctcccaggccaccacgctgcacgtgcccagccaggacccggcctccatccagcacctccagcccgcgcaccggctgagcgcctcccccaccgtgagctccagcagcctggtcctctaccagtccagcgactccagcaacggccagtcccacctcctgccgagcaaccactccgtgatcgagaccttcatcagcacccagatggcctccagctcccagtgaggactagtccctgttcccagagcccacttttttttctttttttgaaataaaatagcctgtctttcagatctaaaaaaaaaaaaaaaaaaaaaaaaaaaaaaaaaaaaaaaaaaaaaaaaaaaaaaaaaaaaaaaaaaaaaaaaaaaaaaaaaaaaaaaaaaaaaaaaaaaa

SEQ ID NO: 5706 - RNA, 2144 nt, synthetic construct
  misc_feature 1..2144: note = mRNA a-1 (A100) (opt2) from Homo sapiens__NP_000536.6__HNF1A(1-631)
  source 1..2144: mol_type = other RNA
aggagagtcccgcagtcggcgtccagcggctctgcttgttcgtgtgtgtgtcgttgcaggccttattcaagcttaccatggtctccaagctctcccagctccagaccgagctcctcgccgccctcctcgagtccggcctctccaaggaggccctcatccaggccctcggcgagcccggcccctacctcctcgccggcgagggccccctcgacaagggcgagtcctgcggcggcggccgcggcgagctcgccgagctccccaacggcctcggcgagacccgcggctccgaggacgagaccgacgacgacggcgaggacttcaccccccccatcctcaaggagctcgagaacctctcccccgaggaggccgcccaccagaaggccgtcgtcgagaccctcctccaggaggacccctggcgcgtcgccaagatggtcaagtcctacctccagcagcacaacatcccccagcgcgaggtcgtcgacaccaccggcctcaaccagtcccacctctcccagcacctcaacaagggcacccccatgaagacccagaagcgcgccgccctctacacctggtacgtccgcaagcagcgcgaggtcgcccagcagttcacccacgccggccagggcggcctcatcgaggagcccaccggcgacgagctccccaccaagaagggccgccgcaaccgcttcaagtggggccccgcctcccagcagatcctcttccaggcctacgagcgccagaagaacccctccaaggaggagcgcgagaccctcgtcgaggagtgcaaccgcgccgagtgcatccagcgcggcgtctccccctcccaggcccagggcctcggctccaacctcgtcaccgaggtccgcgtctacaactggttcgccaaccgccgcaaggaggaggccttccgccacaagctcgccatggacacctactccggccccccccccggccccggccccggccccgccctccccgcccactcctcccccggcctccccccccccgccctctccccctccaaggtccacggcgtccgctacggccagcccgccacctccgagaccgccgaggtcccctcctcctccggcggccccctcgtcaccgtctccacccccctccaccaggtctcccccaccggcctcgagccctcccactccctcctctccaccgaggccaagctcgtctccgccgccggcggccccctcccccccgtctccaccctcaccgccctccactccctcgagcagacctcccccggcctcaaccagcagccccagaacctcatcatggcctccctccccggcgtcatgaccatcggccccggcgagcccgcctccctcggccccaccttcaccaacaccggcgcctccaccctcgtcatcggcctcgcctccacccaggcccagtccgtccccgtcatcaactccatgggctcctccctcaccaccctccagcccgtccagttctcccagcccctccacccctcctaccagcagcccctcatgccccccgtccagtcccacgtcacccagtcccccttcatggccaccatggcccagctccagtccccccacgccctctactcccacaagcccgaggtcgcccagtacacccacaccggcctcctcccccagaccatgctcatcaccgacaccaccaacctctccgccctcgcctccctcacccccaccaagcaggtcttcacctccgacaccgaggcctcctccgagtccggcctccacacccccgcctcccaggccaccaccctccacgtcccctcccaggaccccgcctccatccagcacctccagcccgcccaccgcctctccgcctcccccaccgtctcctcctcctccctcgtcctctaccagtcctccgactcctccaacggccagtcccacctcctcccctccaaccactccgtcatcgagaccttcatctccacccagatggcctcctcctcccagtgaggactagtccctgttcccagagcccacttttttttctttttttgaaataaaatagcctgtctttcagatctaaaaaaaaaaaaaaaaaaaaaaaaaaaaaaaaaaaaaaaaaaaaaaaaaaaaaaaaaaaaaaaaaaaaaaaaaaaaaaaaaaaaaaaaaaaaaaaaaaaa

SEQ ID NO: 5707 - RNA, 2144 nt, synthetic construct
  misc_feature 1..2144: note = mRNA a-1 (A100) (opt3) from Homo sapiens__NP_000536.6__HNF1A(1-631)
  source 1..2144: mol_type = other RNA
aggagagtcccgcagtcggcgtccagcggctctgcttgttcgtgtgtgtgtcgttgcaggccttattcaagcttaccatggtgagcaagctgtcccagctccaaaccgagcttctggccgctttgttagaatctggcctgtcaaaagaggcactaatccaggccctcggggaacccggaccttacctgcttgcgggtgagggcccactggacaagggggaaagttgcggaggcggtagaggggagttggctgagctcccgaacggactgggcgaaacaaggggcagcgaggatgaaactgacgatgacggggaggatttcacgccccctattctgaaagagctcgaaaatttatccccagaggaagccgcacaccagaaggccgtcgttgagaccctgcttcaggaagacccctggcgggtggctaaaatggtaaagtcttatttgcaacagcataacatacctcagcgcgaggtggtcgatacaactggactgaatcagtcgcacctatcacaacatctcaacaagggtaccccaatgaaaacacagaagcgagcagccctgtacacctggtatgtgcgtaaacagagagaggttgctcagcaatttactcacgccggccaagggggacttatcgaggaacccacaggcgacgaactgcctaccaagaaaggtaggcggaatcgcttcaagtgggggccagcgagccagcagattttgtttcaggcatacgagagacagaagaacccgagtaaagaagagagggagacgctcgtggaagagtgtaatcgggccgaatgcatccagcgcggagtctccccctctcaagctcagggcctgggcagcaacttagtgactgaggtacgagtttataattggttcgccaacagaaggaaggaagaggcatttcggcataaactggctatggatacctactccgggcctccacccggacctggtccaggccccgccctcccggcgcactcaagtcctgggcttccccctccagccctgagcccctctaaggtgcacggagtccgttatggccagccagcaacatccgagactgctgaagtgccctcaagcagtggtgggcctttggtgaccgtctctacaccactacatcaggtttccccgaccggcctggagcccagccactcgctcctgtctacggaagccaaacttgtgtccgctgccggaggccctctgccacccgtatcaactttgacagcactccatagtctggagcaaaccagccctgggttaaatcagcagccacagaacctgattatggcctccctacccggagtgatgactatcggtccgggcgagcctgcttctctcgggccaacattcaccaatacgggagcgagcaccctggtcataggccttgcatcaacacaagcccagagtgtgcccgttatcaactccatgggtagctctttgactaccctgcagcctgtgcagttttcacaacccctccacccaagttaccagcagcctctgatgcccccagtccaaagccacgtgacacagtccccgttcatggctactatggcccagcttcagtctcctcatgcactgtactcgcacaagcccgaagtagcccaatatacccatacagggttgctcccacagaccatgctgattactgacacgacaaatttaagcgctctggcctccctaacccccactaaacaggtttttacctcagatacagaggcaagttctgaaagcggcctccacacccctgcgtcccaggctactacactgcatgtgccatcacaagaccccgccagcatccagcaccttcagcctgcacaccgcttgtctgcctccccgacggtcagttctagctccctggtgctctaccagtcaagtgatagctcgaacggacaatcccatctgttaccatctaaccacagcgtcattgagaccttcatctcaactcagatggctagttcctctcagtgaggactagtccctgttcccagagcccacttttttttctttttttgaaataaaatagcctgtctttcagatctaaaaaaaaaaaaaaaaaaaaaaaaaaaaaaaaaaaaaaaaaaaaaaaaaaaaaaaaaaaaaaaaaaaaaaaaaaaaaaaaaaaaaaaaaaaaaaaaaaaa

SEQ ID NO: 5708 - RNA, 2144 nt, synthetic construct
  misc_feature 1..2144: note = mRNA a-1 (A100) (opt4) from Homo sapiens__NP_000536.6__HNF1A(1-631)
  source 1..2144: mol_type = other RNA
aggagagtcccgcagtcggcgtccagcggctctgcttgttcgtgtgtgtgtcgttgcaggccttattcaagcttaccatggtgagcaagctgagccagctgcagaccgagctgctggccgccctgctggagagcggcctgagcaaggaggccctgatccaggccctgggcgagcccggcccctacctgctggccggcgagggccccctggacaagggcgagagctgcggcggcggcagaggcgagctggccgagctgcccaacggcctgggcgagaccagaggcagcgaggacgagaccgacgacgacggcgaggacttcaccccccccatcctgaaggagctggagaacctgagccccgaggaggccgcccaccagaaggccgtggtggagaccctgctgcaggaggacccctggagagtggccaagatggtgaagagctacctgcagcagcacaacatcccccagagagaggtggtggacaccaccggcctgaaccagagccacctgagccagcacctgaacaagggcacccccatgaagacccagaagagagccgccctgtacacctggtacgtgagaaagcagagagaggtggcccagcagttcacccacgccggccagggcggcctgatcgaggagcccaccggcgacgagctgcccaccaagaagggcagaagaaacagattcaagtggggccccgccagccagcagatcctgttccaggcctacgagagacagaagaaccccagcaaggaggagagagagaccctggtggaggagtgcaacagagccgagtgcatccagagaggcgtgagccccagccaggcccagggcctgggcagcaacctggtgaccgaggtgagagtgtacaactggttcgccaacagaagaaaggaggaggccttcagacacaagctggccatggacacctacagcggccccccccccggccccggccccggccccgccctgcccgcccacagcagccccggcctgcccccccccgccctgagccccagcaaggtgcacggcgtgagatacggccagcccgccaccagcgagaccgccgaggtgcccagcagcagcggcggccccctggtgaccgtgagcacccccctgcaccaggtgagccccaccggcctggagcccagccacagcctgctgagcaccgaggccaagctggtgagcgccgccggcggccccctgccccccgtgagcaccctgaccgccctgcacagcctggagcagaccagccccggcctgaaccagcagccccagaacctgatcatggccagcctgcccggcgtgatgaccatcggccccggcgagcccgccagcctgggccccaccttcaccaacaccggcgccagcaccctggtgatcggcctggccagcacccaggcccagagcgtgcccgtgatcaacagcatgggcagcagcctgaccaccctgcagcccgtgcagttcagccagcccctgcaccccagctaccagcagcccctgatgccccccgtgcagagccacgtgacccagagccccttcatggccaccatggcccagctgcagagcccccacgccctgtacagccacaagcccgaggtggcccagtacacccacaccggcctgctgccccagaccatgctgatcaccgacaccaccaacctgagcgccctggccagcctgacccccaccaagcaggtgttcaccagcgacaccgaggccagcagcgagagcggcctgcacacccccgccagccaggccaccaccctgcacgtgcccagccaggaccccgccagcatccagcacctgcagcccgcccacagactgagcgccagccccaccgtgagcagcagcagcctggtgctgtaccagagcagcgacagcagcaacggccagagccacctgctgcccagcaaccacagcgtgatcgagaccttcatcagcacccagatggccagcagcagccagtgaggactagtccctgttcccagagcccacttttttttctttttttgaaataaaatagcctgtctttcagatctaaaaaaaaaaaaaaaaaaaaaaaaaaaaaaaaaaaaaaaaaaaaaaaaaaaaaaaaaaaaaaaaaaaaaaaaaaaaaaaaaaaaaaaaaaaaaaaaaaaa

SEQ ID NO: 5709 - RNA, 2144 nt, synthetic construct
  misc_feature 1..2144: note = mRNA a-1 (A100) (opt5) from Homo sapiens__NP_000536.6__HNF1A(1-631)
  source 1..2144: mol_type = other RNA
aggagagtcccgcagtcggcgtccagcggctctgcttgttcgtgtgtgtgtcgttgcaggccttattcaagcttaccatggtgagcaagctgtcccagctccaaaccgagctgcttgccgctctgctcgaatctggcctgagcaaagaggcccttatccaggcgctgggggaacccggaccttacctcctggctggcgaggggccgctggacaagggagaatcctgcggcgggggaagaggcgagctcgccgagctgcccaacggccttggggaaacacggggatctgaggatgaaacggacgatgacggcgaggatttcacccctcccattctgaaagagctcgaaaatctgagccctgaggaagccgctcaccagaaggccgtcgttgagacacttctgcaggaagacccctggcgcgtggctaaaatggtgaagtcctatctccaacagcataacatccctcagagagaggtcgtggataccacagggctgaatcagtctcacctgagccaacatctcaacaagggaaccccgatgaaaacacagaagcgggccgcgctgtacacctggtatgttcgcaaacagagagaggtggcccagcaatttacgcacgctggccaagggggacttattgaagaacccaccggcgacgaactgcctacaaagaaaggccggcgcaatagattcaagtgggggcccgcctcccagcagatcctctttcaggcttacgagcggcagaagaaccctagcaaagaggagcgcgagaccctggtcgaagagtgtaatagagccgaatgcattcagcggggagtgtctccctcccaagcgcagggccttgggagcaacctggttacagaggtgcgcgtctataattggttcgccaacagacggaaggaagaggcttttcgccataaactcgccatggatacctactctggaccgcctcccggccctgggcccggacccgctctgcctgcccactccagcccgggcctgccccctcccgccctctctccttccaaggtgcacggcgtgagatatgggcagcccgctacgagcgagacagcggaagtcccgtcctctagcggaggccctctggttaccgtgtccacaccccttcatcaggtgagccctaccgggctggagccctctcactccctcctgagcaccgaagccaaacttgtctctgctgccggaggccctctgcccccggtgagcacactcacggccctgcattccctggagcaaacctctcctgggctcaatcagcagccccagaacctgatcatggctagccttcccggcgttatgacaatcggacctggcgagccggcctccctggggcccaccttcacaaataccggagcgagcacgctcgtgattggcctggcttctacacaagcccagtccgtccctgtgatcaacagcatggggtcttccctgaccacccttcagcccgttcagtttagccaacctctccacccctcctaccagcagcctctgatgcccccggtgcaatctcacgtcacacagagccctttcatggccaccatggctcagctgcagagcccccatgccctctactctcacaagcctgaagtggctcaatatacacatacgggactgcttccccagaccatgctgattacagacaccacaaatctcagcgccctggcgtccctgaccccgacgaaacaggtctttaccagcgatacagaggcctcttccgaaagcggccttcacacccctgcttctcaggccacaaccctccatgtgccctcccaagaccctgctagcatccagcatctgcagcccgcccaccggctgtctgcgagccccacggtttcctcctcttccctcgtgctgtaccagagctccgattctagcaacgggcaatcccaccttctgccttctaaccacagcgtcattgagacattcatctccacccagatggcctctagctcccagtgaggactagtccctgttcccagagcccacttttttttctttttttgaaataaaatagcctgtctttcagatctaaaaaaaaaaaaaaaaaaaaaaaaaaaaaaaaaaaaaaaaaaaaaaaaaaaaaaaaaaaaaaaaaaaaaaaaaaaaaaaaaaaaaaaaaaaaaaaaaaaa

SEQ ID NO: 5710 - RNA, 2144 nt, synthetic construct
  misc_feature 1..2144: note = mRNA a-1 (A100) (opt11) from Homo sapiens__NP_000536.6__HNF1A(1-631)
  source 1..2144: mol_type = other RNA
aggagagtcccgcagtcggcgtccagcggctctgcttgttcgtgtgtgtgtcgttgcaggccttattcaagcttaccatggtatccaaactctcccaactccaaaccgaacttctcgcagcccttctagagagcggcctttccaaagaagccctgatacaagcactcggagaacccggcccatacctcctcgccggcgagggccctttagacaaaggtgaatcctgcggtggtggtcgtggagaactagctgaactaccgaacggcttaggcgaaacccgaggctccgaagatgaaaccgacgacgatggtgaggacttcacacccccaatactaaaagaactagaaaacctctcacccgaagaagccgctcaccaaaaagccgttgtagaaaccctactccaagaagacccctggcgagtagcgaaaatggtaaaatcatacctccaacaacacaacatcccccaacgcgaagtcgtcgacacaaccggcctaaaccaatcccacctctcccaacacctcaacaaaggcacaccaatgaaaacacaaaaacgcgcagccctctacacatggtacgtacgaaaacaacgcgaagtcgcccaacaattcacacacgccggacaaggaggactaatcgaagaacccaccggcgacgaactacctacaaagaaaggccgccgaaaccgtttcaaatggggccccgcctcacaacaaatcctattccaagcctacgaacgccagaaaaaccccagcaaagaagaacgagaaaccctcgtcgaagaatgcaatcgcgcggagtgcattcaacgaggcgtctctccctcccaagcccaaggacttggctccaacctcgtcaccgaagtgagagtctacaactggttcgccaaccgtcgcaaagaagaagccttccgacataaactcgctatggacacatactcaggcccacctcccggccccggccccggtcccgcactccccgcgcactcatcccctggcctacccccacccgccctctcaccgtccaaagttcacggagtacgctacggccaaccggctacctcagaaacagcagaagtcccttcctcctccggcggcccactcgtcaccgtaagcactcccctacaccaagtatcacccaccggcctcgaaccatcccactccttgctgtcaacagaagccaaacttgtctcagcggccggtggaccactgccacccgtctccaccctcaccgcactccactcactcgaacaaaccagcccaggcctgaaccaacaaccccaaaacctaattatggcatcacttcccggagtcatgactattggacccggcgaaccagcatcattaggcccgacattcaccaacacaggagcttccaccctcgtcataggactagcctccacacaagctcaatccgtacccgttatcaactccatgggctcatccctcacaaccctacaacccgtacaattttcccagcccctacacccatcctaccaacaacccctaatgcctcccgtccaatcccatgtaactcaatcccccttcatggccaccatggcccaactccaatcaccccacgcactctactcccacaagccagaagtcgctcaatacacccacaccggactcctaccccagaccatgctaataaccgataccacaaacctctcagccctcgcctcactcactccaaccaaacaagtcttcaccagcgacaccgaagcctcatcagaatccggcctccatacccccgcctctcaagccaccacactacacgtcccatcgcaagaccccgcctccatccaacacttacaacccgcacaccgtctctcagcctcacctaccgtctcatcatccagtctagtcctataccaatcatctgactcctcaaacggccaatcccacctccttccttcaaaccactcagttatcgaaacgttcatctccactcaaatggcctcatccagccaataaggactagtccctgttcccagagcccacttttttttctttttttgaaataaaatagcctgtctttcagatctaaaaaaaaaaaaaaaaaaaaaaaaaaaaaaaaaaaaaaaaaaaaaaaaaaaaaaaaaaaaaaaaaaaaaaaaaaaaaaaaaaaaaaaaaaaaaaaaaaaa

SEQ ID NO: 5711 - RNA, 2144 nt, synthetic construct
  misc_feature 1..2144: note = mRNA a-1 (A100) (opt28) from Homo sapiens__NP_000536.6__HNF1A(1-631)
  source 1..2144: mol_type = other RNA
aggagagtcccgcagtcggcgtccagcggctctgcttgttcgtgtgtgtgtcgttgcaggccttattcaagcttaccatggtgagcaagctgtcccagctgcagaccgagctgctggcagccctgctggaatctggactgtcaaaagaggctctgatccaggcactgggcgaaccagggccctacctgctggccggagagggccctctggacaagggggaaagttgcggaggcggacggggcgagctggctgaactgccaaacgggctgggagagacaaggggcagcgaggatgaaactgacgatgacggggaggacttcacaccccctattctgaaagaactggagaatctgtccccagaagaggcagcccaccagaaggctgtcgtggaaaccctgctgcaggaggatccctggagagtggcaaagatggtcaaatcttatctgcagcagcacaacatccctcagcgcgaagtggtggacactaccggactgaatcagagccacctgtcacagcatctgaacaagggcacaccaatgaaaactcagaagcgagccgctctgtacacctggtacgtccggaagcagagggaggtggcacagcagtttacacacgccgggcagggaggcctgatcgaggaacccaccggagacgagctgcctactaaaaaggggagacgcaatcggttcaaatggggcccagcaagtcagcagattctgtttcaggcttatgaaaggcagaagaacccctccaaggaggaaagagagacactggtggaagagtgcaatcgagccgagtgtatccagcggggagtcagcccttctcaggcacagggcctggggagcaacctggtgaccgaagtgcgcgtctacaactggttcgctaataggagaaaagaggaagcctttcggcataagctggcaatggatacttactccggaccaccccctggcccaggacccgggcctgctctgccagcccactcaagtcccggcctgcctccacccgcactgagcccttctaaagtgcacggagtgcgatatggccagccagctacctccgagacagccgaagtccccagctcaagtgggggacctctggtgaccgtgtctactccactgcatcaggtctcccccacaggcctggagcctagccacagcctgctgtccaccgaagcaaagctggtgtcagccgctggagggccactgcccccagtgtctacactgactgcactgcatagtctggagcagaccagccctggcctgaaccagcagccccagaatctgattatggcctccctgccaggagtcatgacaatcgggcctggcgaacccgcatctctgggaccaactttcaccaacacaggcgctagcaccctggtgatcggactggcatcaactcaggcccagagtgtgcctgtcattaattccatggggagctctctgacaaccctgcagcccgtgcagttcagccagccactgcacccttcctaccagcagcccctgatgccacctgtccaatcacacgtgactcagagtccctttatggctaccatggcacagctgcagagcccacatgccctgtactctcacaaacctgaggtggctcagtatacacataccggcctgctgccccagactatgctgatcacagacaccacaaacctgtccgcactggccagcctgactccaaccaagcaggtcttcacatcagatactgaggctagttccgaatctggactgcacacccctgcaagccaggccacaaccctgcatgtgccctcacaggacccagcaagcatccagcatctgcagcctgctcacaggctgtccgccagtcccactgtgtctagctcctcactggtcctgtaccagtctagcgacagttccaatgggcagagccatctgctgccatctaaccactcagtgattgagacctttatcagcacacagatggcatccagtagccagtgaggactagtccctgttcccagagcccacttttttttctttttttgaaataaaatagcctgtctttcagatctaaaaaaaaaaaaaaaaaaaaaaaaaaaaaaaaaaaaaaaaaaaaaaaaaaaaaaaaaaaaaaaaaaaaaaaaaaaaaaaaaaaaaaaaaaaaaaaaaaaa

SEQ ID NO: 5712 - RNA, 2144 nt, synthetic construct
  misc_feature 1..2144: note = mRNA a-1 (A100) (opt29) from Homo sapiens__NP_000536.6__HNF1A(1-631)
  source 1..2144: mol_type = other RNA
aggagagtcccgcagtcggcgtccagcggctctgcttgttcgtgtgtgtgtcgttgcaggccttattcaagcttaccatggtgagcaagctgagccagctgcagaccgagctgctggccgccctgctggaatctggcctgagcaaggaggccctgatccaggccctgggcgaacctggcccctacctgctggccggagagggccctctggacaagggcgaaagctgcggcggcggccggggcgagctggccgaactccccaacggcctgggggagaccagaggctccgaagacgagaccgatgacgacggcgaagacttcacacctccaatcctgaaggagctggagaacctgagccctgaagaggccgcccaccagaaggccgtggtggaaaccctgctgcaagaggacccctggcgggtggccaagatggtgaaaagctacctgcagcagcacaatatccctcagagagaagtggtggataccaccggcctgaaccagagccatctgagccagcacctgaacaagggaacccctatgaagacccagaagcgggccgctctgtacacatggtacgtgagaaagcaacgggaggtggcccagcagtttacccacgccggccagggcggcctgatcgaggaacccaccggcgacgaactgcctaccaagaagggcagacggaacagattcaagtggggcccggcctctcagcagatcctgttccaggcctacgagcggcagaagaaccctagcaaggaagagagagagaccctggtggaagagtgcaaccgggccgaatgtatccagagaggcgtgagccccagccaagcccagggactgggctccaatctggtgaccgaggtgcgggtgtacaactggtttgccaacagacggaaggaagaggccttcagacacaagctggccatggacacctacagcggccctccccctggccctggccccggccctgccctgccagcccacagcagccctggcctgccccctcctgcactgtctcccagcaaggtgcacggcgtgcggtacggacagcctgccacaagcgaaaccgccgaggtgcccagctccagcggcggccctctggtgaccgtgagcacccctctgcatcaggtgagccccaccggcctggaaccttctcacagcctgctcagcaccgaggccaagctggtgagcgccgccggcggccccctgcctccagtgagcaccctgacagccctgcactccctggaacagaccagccctggcctgaaccagcagccccagaacctgatcatggccagcctgcctggcgtgatgaccatcgggcctggcgagcccgcctctctgggccctaccttcaccaacaccggcgccagcacactggtgatcggactggccagcacccaagcccagagcgtgccggtgatcaatagcatgggctctagcctgaccaccctgcagcctgtgcagttcagccagcccctgcacccttcctaccagcagcccctgatgcctcctgtgcaaagccacgtgacccagagcccctttatggccaccatggcccagctgcagagccctcacgccctgtacagccataaaccagaggtggcccagtacacccacacaggcctgctgcctcagaccatgctgatcaccgacaccaccaacctgtctgccctggccagcctgacccccaccaaacaggtgttcacaagcgataccgaagccagctccgagagcggcctgcacacccctgccagccaggccaccaccctgcacgtgcctagccaagaccccgcctctatccagcacctccagcctgcccacagactgagcgctagccccaccgtgagctccagcagcctggtgctgtaccagagctctgacagcagcaacggccagagccatctgctgcctagcaaccactccgtgatcgaaaccttcattagcacacagatggccagctctagccagtgaggactagtccctgttcccagagcccacttttttttctttttttgaaataaaatagcctgtctttcagatctaaaaaaaaaaaaaaaaaaaaaaaaaaaaaaaaaaaaaaaaaaaaaaaaaaaaaaaaaaaaaaaaaaaaaaaaaaaaaaaaaaaaaaaaaaaaaaaaaaaa

SEQ ID NO: 5713 - RNA, 1085 nt, synthetic construct
  misc_feature 1..1085: note = mRNA a-1 (hSL-A100) (opt1) from EGFP-3xHA R9011
  source 1..1085: mol_type = other RNA
aggagagtcccgcagtcggcgtccagcggctctgcttgttcgtgtgtgtgtcgttgcaggccttattcaagcttaccatggtctccaagggggaggagctgttcacgggcgtcgtcccgatcctcgtggagctcgacggggacgtgaacgggcacaagttctccgtcagcggggagggggagggggacgccacctacgggaagctcacgctcaagttcatctgcaccacggggaagctcccggtcccgtggcccacgctcgtcaccacgctcacctacggggtccagtgcttctcccggtacccggaccacatgaagcagcacgacttcttcaagagcgcgatgccggaggggtacgtgcaggagcggacgatcttcttcaaggacgacgggaactacaagacgcgggcggaggtcaagttcgagggggacacgctcgtcaaccggatcgagctcaaggggatcgacttcaaggaggacgggaacatcctcggccacaagctcgagtacaactacaactcccacaacgtgtacatcatggccgacaagcagaagaacgggatcaaggtcaacttcaagatccggcacaacatcgaggacgggtccgtccagctggcggaccactaccagcagaacaccccgatcggggacgggccggtcctcctcccggacaaccactacctctccacccagagcgccctctccaaggacccgaacgagaagcgggaccacatggtgctcctcgagttcgtcacggccgcgggcatcaccctggggatggacgagctctacaaggcctatccttatgatgttcctgattatgcagcctacccctacgacgtgccggactacgccgcctacccctatgacgtgcctgattacgccgcgtgaggactagtccctgttcccagagcccacttttttttctttttttgaaataaaatagcctgtctttcagatctcaaaggctcttttcagagccaccaaaaaaaaaaaaaaaaaaaaaaaaaaaaaaaaaaaaaaaaaaaaaaaaaaaaaaaaaaaaaaaaaaaaaaaaaaaaaaaaaaaaaaaaaaaaaaaaaaaaa

SEQ ID NO: 5714 - RNA, 913 nt, synthetic construct
  misc_feature 1..913: note = mRNA a-1 (A64-N5) (wt) from ZsGreen R7797
  source 1..913: mol_type = other RNA
aggagagtcccgcagtcggcgtccagcggctctgcttgttcgtgtgtgtgtcgttgcaggccttattcaagcttaccatggctcagtcaaagcacggtctaacaaaagaaatgacaatgaaataccgtatggaagggtgcgtcgatggacataaatttgtgatcacgggagagggcattggatatccgttcaaagggaaacaggctattaatctgtgtgtggtcgaaggtggaccattgccatttgccgaagacatattgtcagctgcctttaactacggaaacagggttttcactgaatatcctcaagacatagttgactatttcaagaactcgtgtcctgctggatatacatgggacaggtcttttctctttgaggatggagcagtttgcatatgtaatgcagatataacagtgagtgttgaagaaaactgcatgtatcatgagtccaaattttatggagtgaattttcctgctgatggacctgtgatgaaaaagatgacagataactgggagccatcctgcgagaagatcataccagtacctaagcaggggatattgaaaggggatgtctccatgtacctccttctgaaggatggtgggcgtttacggtgccaattcgacacagtttacaaagcaaagtctgtgccaagaaagatgccggactggcacttcatccagcataagctcacccgtgaagaccgcagcgatgctaagaatcagaaatggcatctgacagaacatgctattgcatccggatctgcattgccctgaggactagtccctgttcccagagcccacttttttttctttttttgaaataaaatagcctgtctttcagatctaaaaaaaaaaaaaaaaaaaaaaaaaaaaaaaaaaaaaaaaaaaaaaaaaaaaaaaaaaaaaaaagaatt

SEQ ID NO: 5715 - RNA, 1642 nt, synthetic construct
  misc_feature 1..1642: note = mRNA a-1 (A64-N5) (opt29) from Homo sapiens__NP_000448.3__HNF4A(1-474) R7805
  source 1..1642: mol_type = other RNA
aggagagtcccgcagtcggcgtccagcggctctgcttgttcgtgtgtgtgtcgttgcaggccttattcaagcttaccatgagactgagcaagaccctggtggacatggacatggccgactactctgccgccctggaccctgcctacaccaccctggagttcgaaaacgtgcaagtgctgaccatgggcaacgacaccagccctagcgagggcaccaacctgaacgcccctaatagcctgggagtgtccgccctgtgtgccatctgtggcgatagagccaccggcaagcactacggcgccagctcttgtgatggctgcaagggcttcttccggcggagcgtgcggaagaaccacatgtacagctgccggttcagccggcagtgcgtggtggacaaggataagcggaaccagtgccggtactgcagactgaagaagtgcttcagagccggcatgaagaaagaagccgtgcagaacgagcgggaccggatcagcaccagaagaagcagctacgaggacagcagcctgcccagcatcaacgccctgctgcaggccgaggtgctgagcagacagatcaccagcccagtgtccggcatcaacggcgacatccgggccaagaagatcgccagcattgccgacgtgtgcgagagcatgaaggaacagctgctggtgctggtggaatgggccaagtacatccccgccttttgcgagctgcccctggacgatcaggtggccctgctgagagcacacgccggcgaacatctgctgctgggagccaccaagcggagcatggtgttcaaggacgtgctgctgctgggcaacgactacatcgtgcccagacactgccctgagctggccgagatgagccgggtgtccatcagaatcctggacgaactggtgctgccgtttcaggaactgcagatcgacgacaacgagtacgcctacctgaaggccatcatctttttcgaccccgacgccaagggcctgagcgaccctggcaagatcaagcggctgagaagccaggtgcaagtgtccctggaagattacatcaacgaccggcagtacgacagccggggcagatttggcgaactgctcctgctgctgcccaccctgcagagcatcacctggcagatgatcgagcagatccagttcatcaagctgttcggcatggccaagatcgacaatctgctgcaggaaatgctgctcgggggcagcccttctgatgcccctcatgcccaccaccctctgcaccctcacctgatgcaagaacacatgggcaccaatgtgatcgtggccaacacaatgcccacccacctgagcaacggccagatgtgcgagtggcccagacctagaggacaggccgccacacctgagacacctcagccttctccacctggcggctctggcagcgagccttacaaactgctgcctggcgctgtggccaccatcgtgaaacctctgagcgccatcccccagcccaccatcaccaagcaggaagtgatctgaggactagtccctgttcccagagcccacttttttttctttttttgaaataaaatagcctgtctttcagatctaaaaaaaaaaaaaaaaaaaaaaaaaaaaaaaaaaaaaaaaaaaaaaaaaaaaaaaaaaaaaaaagaatt

SEQ ID NO: 5716 - RNA, 2174 nt, synthetic construct
  misc_feature 1..2174: note = mRNA a-1 (hSL-A100) (opt1) from Homo sapiens__NP_000536.6__HNF1A(1-631)
  source 1..2174: mol_type = other RNA
aggagagtcccgcagtcggcgtccagcggctctgcttgttcgtgtgtgtgtcgttgcaggccttattcaagcttaccatggtgagcaagctgtcccagctgcagaccgagctgctggccgccctcctggagagcggcctgtccaaggaggcgctcatccaggccctgggggagcccggcccgtacctgctcgccggggagggccccctggacaagggggagagctgcggcggcgggcgcggcgagctggccgagctccccaacgggctgggcgagacccgggggtccgaggacgagacggacgacgacggcgaggacttcacgcccccgatcctgaaggagctcgagaacctgagccccgaggaggccgcgcaccagaaggccgtcgtggagaccctgctccaggaggacccctggcgcgtggccaagatggtcaagtcctacctgcagcagcacaacatcccccagcgggaggtggtggacaccaccggcctgaaccagagccacctctcccagcacctgaacaaggggaccccgatgaagacccagaagcgcgccgcgctgtacacctggtacgtccggaagcagcgcgaggtggcccagcagttcacgcacgccggccagggcggcctcatcgaggagcccaccggcgacgagctgcccaccaagaaggggcggcgcaaccggttcaagtggggccccgccagccagcagatcctgttccaggcctacgagcgccagaagaacccgtccaaggaggagcgggagaccctcgtggaggagtgcaaccgcgcggagtgcatccagcgcggggtcagcccctcccaggcccagggcctggggagcaacctggtgacggaggtgcgggtctacaactggttcgccaaccggcgcaaggaggaggccttccggcacaagctcgccatggacacctactccgggcccccgcccggccccgggcccggccccgcgctgccggcccacagctcccccgggctgcccccgcccgccctcagcccctccaaggtgcacggcgtgcgctacgggcagcccgccaccagcgagaccgccgaggtccccagctccagcggcggcccgctggtgacggtgtccacgcccctgcaccaggtcagccccaccgggctcgagccgtcccacagcctgctgtccaccgaggcgaagctcgtgagcgccgccggcgggcccctgccgcccgtgtccaccctgaccgccctccacagcctggagcagacctcccccggcctgaaccagcagccccagaacctcatcatggccagcctgcccggggtcatgaccatcggccccggcgagccggcgtccctggggcccacgttcaccaacaccggcgccagcaccctggtgatcgggctcgcctccacgcaggcccagagcgtgcccgtcatcaactccatgggcagctccctgaccaccctgcagcccgtgcagttcagccagccgctccaccccagctaccagcagcccctgatgcccccggtccagtcccacgtgacccagagccccttcatggcgacgatggcccagctgcagagcccccacgccctctactcccacaagcccgaggtggcccagtacacccacaccggcctgctgccgcagaccatgctcatcacggacaccaccaacctgtccgccctggcgagcctcacccccaccaagcaggtcttcacgtccgacaccgaggccagctccgagagcgggctgcacacccccgcctcccaggccaccacgctgcacgtgcccagccaggacccggcctccatccagcacctccagcccgcgcaccggctgagcgcctcccccaccgtgagctccagcagcctggtcctctaccagtccagcgactccagcaacggccagtcccacctcctgccgagcaaccactccgtgatcgagaccttcatcagcacccagatggcctccagctcccagtgatgatgaggactagtccctgttcccagagcccacttttttttctttttttgaaataaaatagcctgtctttcagatctcaaaggctcttttcagagccaccaaaaaaaaaaaaaaaaaaaaaaaaaaaaaaaaaaaaaaaaaaaaaaaaaaaaaaaaaaaaaaaaaaaaaaaaaaaaaaaaaaaaaaaaaaaaaaaaaaaaa

SEQ ID NO: 5717 - RNA, 2174 nt, synthetic construct; identical to SEQ ID NO: 5716
  misc_feature 1..2174: note = mRNA a-1 (hSL-A100) (opt1) from Homo sapiens__NP_000536.6__HNF1A(1-631)
  source 1..2174: mol_type = other RNA
  modified_base 1..2174: mod_base = m1f

SEQ ID NO: 5718 - RNA, 2174 nt, synthetic construct; identical to SEQ ID NO: 5716
  misc_feature 1..2174: note = mRNA a-1 (hSL-A100) (opt1) from Homo sapiens__NP_000536.6__HNF1A(1-631)
  source 1..2174: mol_type = other RNA
  modified_base 1..2174: mod_base = p

SEQ ID NO: 5719 - RNA, 1703 nt, synthetic construct
  misc_feature 1..1703: note = mRNA a-1 (hSL-A100) (opt1) from Homo sapiens__NP_000448.3__HNF4A(1-474) R11540
  source 1..1703: mol_type = other RNA
aggagagtcccgcagtcggcgtccagcggctctgcttgttcgtgtgtgtgtcgttgcaggccttattcaagcttaccatgcgcctgagcaagaccctcgtggacatggacatggccgactactccgccgcgctggaccccgcctacaccacgctggagttcgagaacgtccaggtgctcaccatgggcaacgacaccagcccgtccgaggggaccaacctgaacgcccccaacagcctgggcgtgtccgccctctgcgccatctgcggggaccgggcgacgggcaagcactacggggccagctcctgcgacggctgcaagggcttcttccgccggagcgtccgcaagaaccacatgtactcctgccggttcagccgccagtgcgtggtggacaaggacaagcggaaccagtgccgctactgccggctgaagaagtgcttccgcgccgggatgaagaaggaggccgtccagaacgagcgggaccgcatctccacccggcgcagctcctacgaggacagctccctgcccagcatcaacgcgctcctgcaggccgaggtgctgtcccggcagatcaccagccccgtgtccggcatcaacggggacatccgcgccaagaagatcgccagcatcgccgacgtctgcgagagcatgaaggagcagctcctggtgctggtggagtgggcgaagtacatcccggccttctgcgagctccccctggacgaccaggtcgccctgctccgggcccacgccggcgagcacctcctgctgggggcgaccaagcgctccatggtgttcaaggacgtgctgctgctcggcaacgactacatcgtcccccggcactgccccgagctggccgagatgagccgcgtgtccatccggatcctggacgagctcgtgctgccgttccaggagctgcagatcgacgacaacgagtacgcctacctcaaggccatcatcttcttcgaccccgacgccaagggcctgagcgaccccgggaagatcaagcgcctgcgctcccaggtccaggtgagcctcgaggactacatcaacgaccggcagtacgactcccgcggccggttcggggagctgctgctcctgctgcccacgctccagagcatcacctggcagatgatcgagcagatccagttcatcaagctgttcggcatggcgaagatcgacaacctgctccaggagatgctgctgggcgggtccccgagcgacgcgccccacgcccaccaccccctccacccccacctgatgcaggagcacatgggcaccaacgtgatcgtcgccaacaccatgccgacgcacctgtccaacgggcagatgtgcgagtggccccgcccccggggccaggccgccacccccgagaccccgcagcccagcccgcccgggggctccggcagcgagccctacaagctgctccccggggccgtggccaccatcgtgaagcccctgtccgccatcccccagccgacgatcaccaagcaggaggtcatctgatgatgaggactagtccctgttcccagagcccacttttttttctttttttgaaataaaatagcctgtctttcagatctcaaaggctcttttcagagccaccaaaaaaaaaaaaaaaaaaaaaaaaaaaaaaaaaaaaaaaaaaaaaaaaaaaaaaaaaaaaaaaaaaaaaaaaaaaaaaaaaaaaaaaaaaaaaaaaaaaaa

SEQ ID NO: 5720 - RNA, 1703 nt, synthetic construct
  misc_feature 1..1703: note = mRNA a-1 (hSL-A100) (opt1) from Homo sapiens__NP_000448.3__HNF4A(1-474)(S461E) R11542
  source 1..1703: mol_type = other RNA
aggagagtcccgcagtcggcgtccagcggctctgcttgttcgtgtgtgtgtcgttgcaggccttattcaagcttaccatgcgcctgagcaagaccctcgtggacatggacatggccgactactccgccgcgctggaccccgcctacaccacgctggagttcgagaacgtccaggtgctcaccatgggcaacgacaccagcccgtccgaggggaccaacctgaacgcccccaacagcctgggcgtgtccgccctctgcgccatctgcggggaccgggcgacgggcaagcactacggggccagctcctgcgacggctgcaagggcttcttccgccggagcgtccgcaagaaccacatgtactcctgccggttcagccgccagtgcgtggtggacaaggacaagcggaaccagtgccgctactgccggctgaagaagtgcttccgcgccgggatgaagaaggaggccgtccagaacgagcgggaccgcatctccacccggcgcagctcctacgaggacagctccctgcccagcatcaacgcgctcctgcaggccgaggtgctgtcccggcagatcaccagccccgtgtccggcatcaacggggacatccgcgccaagaagatcgccagcatcgccgacgtctgcgagagcatgaaggagcagctcctggtgctggtggagtgggcgaagtacatcccggccttctgcgagctccccctggacgaccaggtcgccctgctccgggcccacgccggcgagcacctcctgctgggggcgaccaagcgctccatggtgttcaaggacgtgctgctgctcggcaacgactacatcgtcccccggcactgccccgagctggccgagatgagccgcgtgtccatccggatcctggacgagctcgtgctgccgttccaggagctgcagatcgacgacaacgagtacgcctacctcaaggccatcatcttcttcgaccccgacgccaagggcctgagcgaccccgggaagatcaagcgcctgcgctcccaggtccaggtgagcctcgaggactacatcaacgaccggcagtacgactcccgcggccggttcggggagctgctgctcctgctgcccacgctccagagcatcacctggcagatgatcgagcagatccagttcatcaagctgttcggcatggcgaagatcgacaacctgctccaggagatgctgctgggcgggtccccgagcgacgcgccccacgcccaccaccccctccacccccacctgatgcaggagcacatgggcaccaacgtgatcgtcgccaacaccatgccgacgcacctgtccaacgggcagatgtgcgagtggccccgcccccggggccaggccgccacccccgagaccccgcagcccagcccgcccgggggctccggcagcgagccctacaagctgctccccggggccgtggccaccatcgtgaagcccctggaggccatcccccagccgacgatcaccaagcaggaggtcatctgatgatgaggactagtccctgttcccagagcccacttttttttctttttttgaaataaaatagcctgtctttcagatctcaaaggctcttttcagagccaccaaaaaaaaaaaaaaaaaaaaaaaaaaaaaaaaaaaaaaaaaaaaaaaaaaaaaaaaaaaaaaaaaaaaaaaaaaaaaaaaaaaaaaaaaaaaaaaaaaaaa

SEQ ID NO: 5721 - RNA, 1703 nt, synthetic construct
  misc_feature 1..1703: note = mRNA a-1 (hSL-A100) (opt1) from Homo sapiens__NP_000448.3__HNF4A(1-474)(S87A_K106R_K108R_K126R_K 127R_S142A_S143A_S148A_T166A_S167A_S313A_S378A_T429A_T432A_ S436A_K458R_S461E) R11541
  source 1..1703: mol_type = other RNA
aggagagtcccgcagtcggcgtccagcggctctgcttgttcgtgtgtgtgtcgttgcaggccttattcaagcttaccatgcgcctgagcaagaccctcgtggacatggacatggccgactactccgccgcgctggaccccgcctacaccacgctggagttcgagaacgtccaggtgctcaccatgggcaacgacaccagcccgtccgaggggaccaacctgaacgcccccaacagcctgggcgtgtccgccctctgcgccatctgcggggaccgggcgacgggcaagcactacggggccagctcctgcgacggctgcaagggcttcttccgccgggcggtccgcaagaaccacatgtactcctgccggttcagccgccagtgcgtggtggaccgcgaccggcggaaccagtgccgctactgccggctgaagaagtgcttccgcgccgggatgcgccgggaggccgtccagaacgagcgggaccgcatctccacccggcgcgccgcctacgaggacagcgccctgcccagcatcaacgcgctcctgcaggccgaggtgctgtcccggcagatcgccgcgcccgtgtccggcatcaacggggacatccgcgccaagaagatcgccagcatcgccgacgtctgcgagagcatgaaggagcagctcctggtgctggtggagtgggcgaagtacatcccggccttctgcgagctccccctggacgaccaggtcgccctgctccgggcccacgccggcgagcacctcctgctgggggcgaccaagcgctccatggtgttcaaggacgtgctgctgctcggcaacgactacatcgtcccccggcactgccccgagctggccgagatgagccgcgtgtccatccggatcctggacgagctcgtgctgccgttccaggagctgcagatcgacgacaacgagtacgcctacctcaaggccatcatcttcttcgaccccgacgccaagggcctgagcgaccccgggaagatcaagcgcctgcgcgcccaggtccaggtgagcctcgaggactacatcaacgaccggcagtacgactcccgcggccggttcggggagctgctgctcctgctgcccacgctccagagcatcacctggcagatgatcgagcagatccagttcatcaagctgttcggcatggcgaagatcgacaacctgctccaggagatgctgctgggcggggccccgagcgacgcgccccacgcccaccaccccctccacccccacctgatgcaggagcacatgggcaccaacgtgatcgtcgccaacaccatgccgacgcacctgtccaacgggcagatgtgcgagtggccccgcccccggggccaggccgccgcccccgaggccccgcagcccgcgccgcccgggggctccggcagcgagccctacaagctgctccccggggccgtggccaccatcgtgcggcccctggaggccatcccccagccgacgatcaccaagcaggaggtcatctgatgatgaggactagtccctgttcccagagcccacttttttttctttttttgaaataaaatagcctgtctttcagatctcaaaggctcttttcagagccaccaaaaaaaaaaaaaaaaaaaaaaaaaaaaaaaaaaaaaaaaaaaaaaaaaaaaaaaaaaaaaaaaaaaaaaaaaaaaaaaaaaaaaaaaaaaaaaaaaaaaa

SEQ ID NO: 5722 - RNA, 1703 nt, synthetic construct; identical to SEQ ID NO: 5719
  misc_feature 1..1703: note = mRNA a-1 (hSL-A100) (opt1) from Homo sapiens__NP_000448.3__HNF4A(1-474) R11554
  source 1..1703: mol_type = other RNA
  modified_base 1..1703: mod_base = m1f

SEQ ID NO: 5723 - RNA, 1703 nt, synthetic construct; identical to SEQ ID NO: 5720
  misc_feature 1..1703: note = mRNA a-1 (hSL-A100) (opt1) from Homo sapiens__NP_000448.3__HNF4A(1-474)(S461E) R11556
  source 1..1703: mol_type = other RNA
  modified_base 1..1703: mod_base = m1f

SEQ ID NO: 5724 - RNA, 1703 nt, synthetic construct; identical to SEQ ID NO: 5721
  misc_feature 1..1703: note = mRNA a-1 (hSL-A100) (opt1) from Homo sapiens__NP_000448.3__HNF4A(1-474)(S87A_K106R_K108R_K126R_K 127R_S142A_S143A_S148A_T166A_S167A_S313A_S378A_T429A_T432A_ S436A_K458R_S461E) R11555
  source 1..1703: mol_type = other RNA
  modified_base 1..1703: mod_base = m1f

SEQ ID NO: 5725 - RNA, 1703 nt, synthetic construct; identical to SEQ ID NO: 5719
  misc_feature 1..1703: note = mRNA a-1 (hSL-A100) (opt1) from Homo sapiens__NP_000448.3__HNF4A(1-474)
  source 1..1703: mol_type = other RNA
  modified_base 1..1703: mod_base = p

SEQ ID NO: 5726 - RNA, 1703 nt, synthetic construct; identical to SEQ ID NO: 5720
  misc_feature 1..1703: note = mRNA a-1 (hSL-A100) (opt1) from Homo sapiens__NP_000448.3__HNF4A(1-474)(S461E)
  source 1..1703: mol_type = other RNA
  modified_base 1..1703: mod_base = p

SEQ ID NO: 5727 - RNA, 1703 nt, synthetic construct; identical to SEQ ID NO: 5721
  misc_feature 1..1703: note = mRNA a-1 (hSL-A100) (opt1) from Homo sapiens__NP_000448.3__HNF4A(1-474)(S87A_K106R_K108R_K126R_K 127R_S142A_S143A_S148A_T166A_S167A_S313A_S378A_T429A_T432A_ S436A_K458R_S461E)
  source 1..1703: mol_type = other RNA
  modified_base 1..1703: mod_base = p

SEQ ID NO: 5728 - RNA, 1703 nt, synthetic construct
  misc_feature 1..1703: note = mRNA a-1 (hSL-A100) (opt29) from Homo sapiens__NP_000448.3__HNF4A(1-474)
  source 1..1703: mol_type = other RNA
aggagagtcccgcagtcggcgtccagcggctctgcttgttcgtgtgtgtgtcgttgcaggccttattcaagcttaccatgagactgagcaagaccctggtggacatggacatggccgactactctgccgccctggaccctgcctacaccaccctggagttcgaaaacgtgcaagtgctgaccatgggcaacgacaccagccctagcgagggcaccaacctgaacgcccctaatagcctgggagtgtccgccctgtgtgccatctgtggcgatagagccaccggcaagcactacggcgccagctcttgtgatggctgcaagggcttcttccggcggagcgtgcggaagaaccacatgtacagctgccggttcagccggcagtgcgtggtggacaaggataagcggaaccagtgccggtactgcagactgaagaagtgcttcagagccggcatgaagaaagaagccgtgcagaacgagcgggaccggatcagcaccagaagaagcagctacgaggacagcagcctgcccagcatcaacgccctgctgcaggccgaggtgctgagcagacagatcaccagcccagtgtccggcatcaacggcgacatccgggccaagaagatcgccagcattgccgacgtgtgcgagagcatgaaggaacagctgctggtgctggtggaatgggccaagtacatccccgccttttgcgagctgcccctggacgatcaggtggccctgctgagagcacacgccggcgaacatctgctgctgggagccaccaagcggagcatggtgttcaaggacgtgctgctgctgggcaacgactacatcgtgcccagacactgccctgagctggccgagatgagccgggtgtccatcagaatcctggacgaactggtgctgccgtttcaggaactgcagatcgacgacaacgagtacgcctacctgaaggccatcatctttttcgaccccgacgccaagggcctgagcgaccctggcaagatcaagcggctgagaagccaggtgcaagtgtccctggaagattacatcaacgaccggcagtacgacagccggggcagatttggcgaactgctcctgctgctgcccaccctgcagagcatcacctggcagatgatcgagcagatccagttcatcaagctgttcggcatggccaagatcgacaatctgctgcaggaaatgctgctcgggggcagcccttctgatgcccctcatgcccaccaccctctgcaccctcacctgatgcaagaacacatgggcaccaatgtgatcgtggccaacacaatgcccacccacctgagcaacggccagatgtgcgagtggcccagacctagaggacaggccgccacacctgagacacctcagccttctccacctggcggctctggcagcgagccttacaaactgctgcctggcgctgtggccaccatcgtgaaacctctgagcgccatcccccagcccaccatcaccaagcaggaagtgatctgatgatgaggactagtccctgttcccagagcccacttttttttctttttttgaaataaaatagcctgtctttcagatctcaaaggctcttttcagagccaccaaaaaaaaaaaaaaaaaaaaaaaaaaaaaaaaaaaaaaaaaaaaaaaaaaaaaaaaaaaaaaaaaaaaaaaaaaaaaaaaaaaaaaaaaaaaaaaaaaaaa

SEQ ID NO: 5729 - RNA, 1703 nt, synthetic construct
  misc_feature 1..1703: note = mRNA a-1 (hSL-A100) (opt29) from Homo sapiens__NP_000448.3__HNF4A(1-474)(S461E)
  source 1..1703: mol_type = other RNA
aggagagtcccgcagtcggcgtccagcggctctgcttgttcgtgtgtgtgtcgttgcaggccttattcaagcttaccatgagactgagcaagaccctggtggacatggacatggccgactactctgccgccctggaccctgcctacaccaccctggagttcgaaaacgtgcaagtgctgaccatgggcaacgacaccagccctagcgagggcaccaacctgaacgcccctaatagcctgggagtgtccgccctgtgtgccatctgtggcgatagagccaccggcaagcactacggcgccagctcttgtgatggctgcaagggcttcttccggcggagcgtgcggaagaaccacatgtacagctgccggttcagccggcagtgcgtggtggacaaggataagcggaaccagtgccggtactgcagactgaagaagtgcttcagagccggcatgaagaaagaagccgtgcagaacgagcgggaccggatcagcaccagaagaagcagctacgaggacagcagcctgcccagcatcaacgccctgctgcaggccgaggtgctgagcagacagatcaccagcccagtgtccggcatcaacggcgacatccgggccaagaagatcgccagcattgccgacgtgtgcgagagcatgaaggaacagctgctggtgctggtggaatgggccaagtacatccccgccttttgcgagctgcccctggacgatcaggtggccctgctgagagcacacgccggcgaacatctgctgctgggagccaccaagcggagcatggtgttcaaggacgtgctgctgctgggcaacgactacatcgtgcccagacactgccctgagctggccgagatgagccgggtgtccatcagaatcctggacgaactggtgctgccgtttcaggaactgcagatcgacgacaacgagtacgcctacctgaaggccatcatctttttcgaccccgacgccaagggcctgagcgaccctggcaagatcaagcggctgagaagccaggtgcaagtgtccctggaagattacatcaacgaccggcagtacgacagccggggcagatttggcgaactgctcctgctgctgcccaccctgcagagcatcacctggcagatgatcgagcagatccagttcatcaagctgttcggcatggccaagatcgacaatctgctgcaggaaatgctgctcgggggcagcccttctgatgcccctcatgcccaccaccctctgcaccctcacctgatgcaagaacacatgggcaccaatgtgatcgtggccaacacaatgcccacccacctgagcaacggccagatgtgcgagtggcccagacctagaggacaggccgccacacctgagacacctcagccttctccacctggcggctctggcagcgagccttacaaactgctgcctggcgctgtggccaccatcgtgaaacctctggaggccatcccccagcccaccatcaccaagcaggaagtgatctgatgatgaggactagtccctgttcccagagcccacttttttttctttttttgaaataaaatagcctgtctttcagatctcaaaggctcttttcagagccaccaaaaaaaaaaaaaaaaaaaaaaaaaaaaaaaaaaaaaaaaaaaaaaaaaaaaaaaaaaaaaaaaaaaaaaaaaaaaaaaaaaaaaaaaaaaaaaaaaaaaa

SEQ ID NO: 5730 - RNA, 1703 nt, synthetic construct
  misc_feature 1..1703: note = mRNA a-1 (hSL-A100) (opt29) from Homo sapiens__NP_000448.3__HNF4A(1-474)(S87A_K106R_K108R_K126R_K 127R_S142A_S143A_S148A_T166A_S167A_S313A_S378A_T429A_T432A_ S436A_K458R_S461E)
  source 1..1703: mol_type = other RNA
aggagagtcccgcagtcggcgtccagcggctctgcttgttcgtgtgtgtgtcgttgcaggccttattcaagcttaccatgagactgagcaagaccctggtggacatggacatggccgactactctgccgccctggaccctgcctacaccaccctggagttcgaaaacgtgcaagtgctgaccatgggcaacgacaccagccctagcgagggcaccaacctgaacgcccctaatagcctgggagtgtccgccctgtgtgccatctgtggcgatagagccaccggcaagcactacggcgccagctcttgtgatggctgcaagggcttcttccggcgggccgtgcggaagaaccacatgtacagctgccggttcagccggcagtgcgtggtggaccgggatagacggaaccagtgccggtactgcagactgaagaagtgcttcagagccggcatgcggagagaagccgtgcagaacgagcgggaccggatcagcaccagaagagccgcctacgaggacagcgccctgcccagcatcaacgccctgctgcaggccgaggtgctgagcagacagatcgccgccccagtgtccggcatcaacggcgacatccgggccaagaagatcgccagcattgccgacgtgtgcgagagcatgaaggaacagctgctggtgctggtggaatgggccaagtacatccccgccttttgcgagctgcccctggacgatcaggtggccctgctgagagcacacgccggcgaacatctgctgctgggagccaccaagcggagcatggtgttcaaggacgtgctgctgctgggcaacgactacatcgtgcccagacactgccctgagctggccgagatgagccgggtgtccatcagaatcctggacgaactggtgctgccgtttcaggaactgcagatcgacgacaacgagtacgcctacctgaaggccatcatctttttcgaccccgacgccaagggcctgagcgaccctggcaagatcaagcggctgagagcccaggtgcaagtgtccctggaagattacatcaacgaccggcagtacgacagccggggcagatttggcgaactgctcctgctgctgcccaccctgcagagcatcacctggcagatgatcgagcagatccagttcatcaagctgttcggcatggccaagatcgacaatctgctgcaggaaatgctgctcgggggcgccccttctgatgcccctcatgcccaccaccctctgcaccctcacctgatgcaagaacacatgggcaccaatgtgatcgtggccaacacaatgcccacccacctgagcaacggccagatgtgcgagtggcccagacctagaggacaggccgccgcccctgaggcccctcagcctgccccacctggcggctctggcagcgagccttacaaactgctgcctggcgctgtggccaccatcgtgagacctctggaggccatcccccagcccaccatcaccaagcaggaagtgatctgatgatgaggactagtccctgttcccagagcccacttttttttctttttttgaaataaaatagcctgtctttcagatctcaaaggctcttttcagagccaccaaaaaaaaaaaaaaaaaaaaaaaaaaaaaaaaaaaaaaaaaaaaaaaaaaaaaaaaaaaaaaaaaaaaaaaaaaaaaaaaaaaaaaaaaaaaaaaaaaaaa

SEQ ID NO: 5731 - RNA, 1703 nt, synthetic construct; identical to SEQ ID NO: 5728
  misc_feature 1..1703: note = mRNA a-1 (hSL-A100) (opt29) from Homo sapiens__NP_000448.3__HNF4A(1-474)
  source 1..1703: mol_type = other RNA
  modified_base 1..1703: mod_base = m1f

SEQ ID NO: 5732 - RNA, 1703 nt, synthetic construct; identical to SEQ ID NO: 5729
  misc_feature 1..1703: note = mRNA a-1 (hSL-A100) (opt29) from Homo sapiens__NP_000448.3__HNF4A(1-474)(S461E)
  source 1..1703: mol_type = other RNA
  modified_base 1..1703: mod_base = m1f

SEQ ID NO: 5733 - RNA, 1703 nt, synthetic construct; identical to SEQ ID NO: 5730
  misc_feature 1..1703: note = mRNA a-1 (hSL-A100) (opt29) from Homo sapiens__NP_000448.3__HNF4A(1-474)(S87A_K106R_K108R_K126R_K 127R_S142A_S143A_S148A_T166A_S167A_S313A_S378A_T429A_T432A_ S436A_K458R_S461E)
  source 1..1703: mol_type = other RNA
  modified_base 1..1703: mod_base = m1f

SEQ ID NO: 5734 - RNA, 1703 nt, synthetic construct; identical to SEQ ID NO: 5728
  misc_feature 1..1703: note = mRNA a-1 (hSL-A100) (opt29) from Homo sapiens__NP_000448.3__HNF4A(1-474)
  source 1..1703: mol_type = other RNA
  modified_base 1..1703: mod_base = p

SEQ ID NO: 5735 - RNA, 1703 nt, synthetic construct; identical to SEQ ID NO: 5729
  misc_feature 1..1703: note = mRNA a-1 (hSL-A100) (opt29) from Homo sapiens__NP_000448.3__HNF4A(1-474)(S461E)
  source 1..1703: mol_type = other RNA
  modified_base 1..1703: mod_base = p

SEQ ID NO: 5736 - RNA, 1703 nt, synthetic construct; identical to SEQ ID NO: 5730
  misc_feature 1..1703: note = mRNA a-1 (hSL-A100) (opt29) from Homo sapiens__NP_000448.3__HNF4A(1-474)(S87A_K106R_K108R_K126R_K 127R_S142A_S143A_S148A_T166A_S167A_S313A_S378A_T429A_T432A_ S436A_K458R_S461E)
  source 1..1703: mol_type = other RNA
  modified_base 1..1703: mod_base = p
